(19) United States
(12) Patent Application Publication
(10) Pub. No.: US 2025/0213726 A1
(43) Pub. Date: Jul. 3, 2025

(54) THERAPEUTIC ADENO-ASSOCIATED VIRUS USING CODON OPTIMIZED NUCLEIC ACID ENCODING ALPHA-GLUCOSIDASE (GAA) FOR TREATING POMPE DISEASE, WITH SIGNAL PEPTIDE MODIFICATIONS

(71) Applicant: ASKLEPIOS BIOPHARMACEUTICAL, INC., Research Triangle Park, NC (US)

(72) Inventors: Anna TRETIAKOVA, Research Triangle Park, NC (US); Xavier AUGUELA MARTINEZ, Research Triangle Park, NC (US); Lester SUAREZ, Research Triangle Park, NC (US); Scott HAMMOND, Research Triangle Park, NC (US)

(73) Assignee: ASKLEPIOS BIOPHARMACEUTICAL, INC., Research Triangle Park, NC (US)

(21) Appl. No.: 18/848,389

(22) PCT Filed: Mar. 17, 2023
(86) PCT No.: PCT/US2023/015531

§ 371 Date: Sep. 18, 2024

Related U.S. Application Data
(60) Provisional application No. 63/444,804, filed on Feb. 10, 2023.
(60) Provisional application No. 63/348,862, filed on Jun. 3, 2022.
(60) Provisional application No. 63/321,336, filed on Mar. 18, 2022.

(51) Int. Cl. A61K 48/00; A61K 38/47; A61P 3/00; C12N 15/86

(52) U.S. Cl. CPC A61K 48/0058; A61K 38/47; A61P 3/00; C12N 15/86; C12Y 302/0102; C12N 2750/14143; C12N 2800/22; C12N 2830/008; C12N 2830/50

(57) ABSTRACT

Disclosed herein is a method for the treatment of Pompe Disease comprising administering a recombinant AAV (rAAV) vector comprising a rAVV genome comprising a heterologous nucleic acid encoding a GAA signal peptide or portion thereof, a heterologous signal peptide, and an acid alpha-glucosidase (GAA) polypeptide, or N-terminal truncation thereof, where the heterologous nucleic acid is operatively linked to a liver-specific promoter, where the nucleic acid encoding GAA polypeptide can be wild type nucleic acid sequence, or modified nucleic acid sequence, or a codon optimized nucleic acid sequence, and can optionally be modified to reduce or completely eliminate CG and CpG dinucleotides and, optionally eliminated alternative reading frames (ARF) content.

### CROSS-REFERENCE TO RELATED APPLICATIONS

[0001] This application claims benefit under 35 U.S.C. § 119(e) of U.S. Provisional Application No. 63/321,336 filed Mar. 18, 2022, U.S. Provisional Application No. 63/348,862 filed Jun. 3, 2022 and U.S. Provisional Application No. 63/444,804 filed Feb. 10, 2023, the contents of each of which are incorporated herein by reference in their entireties.

### SEQUENCE LISTING

[0002] The instant application contains a Sequence Listing as Table 9 herein, which is hereby incorporated by reference in its entirety.

### FIELD OF THE INVENTION

[0003] The present invention relates to methods to treat Pompe disease by administering adeno-associated virus (AAV) particles, virions and vectors for expression of an alpha-glucosidase (GAA) polypeptide, where the nucleic acid encoding GAA can be codon optimized or truncated. The compositions as disclosed herein can be used in methods to treat Pompe disease, including without the clinical need for administration of long-term GAA enzyme replacement therapy (ERT) for an extended period of time.

### BACKGROUND

[0004] Pompe disease (Glycogen storage disease type II; acid maltase deficiency; MIM 232300) is caused by recessive mutations of the GAA gene leading to complete or partial deficiency of the lysosomal enzyme acid α-glucosidase (GAA). Absence of GAA leads to the progressive accumulation of glycogen in the lysosomes of many tissues, particularly skeletal muscle and cardiomyocytes. Impaired energy metabolism then leads secondarily to severely disrupted muscle architecture, dysfunction, autophagy, and in adults, significant fatty replacement of skeletal muscle myocytes.

[0005] Clinically, the condition ranges from a fulminant infantile-onset Pompe disease (IOPD) typically leading to death before 12 months of age to a late-onset Pompe disease (LOPD), which is slowly progressive leading to myopathy causing loss of mobility and typically death from respiratory failure 5-15 years after diagnosis. Infantile-onset patients have cardiomyopathy often noted even at birth or even antenatally, with elevated creatine kinase (CK) and then within weeks to the first months of life develop severe hypotonia, respiratory insufficiency requiring ventilator support and massive cardiomegaly. Deaths are most often the result of cardiorespiratory failure, aspiration pneumonia or ventricular arrhythmias. Late-onset Pompe Disease (LOPD) patients (mostly adults, some juveniles) experience slowly progressive muscle weakness often leading to delayed diagnosis, extensive fatty replacement of trunk and proximal limb muscles, progressing to respiratory failure which is the primary cause of death (Carlier et al. 2011). Basilar artery aneurysms occur and can be life threatening if they rupture (El-Gharbawy et al. 2011; Hobson-Webb et al. 2012). As an alternative or adjunct to enzyme therapy, the feasibility of gene therapy approaches to treat GSD-II have been investigated (Amalfitano, A., et al., (1999) Proc. Natl. Acad. Sci. USA 96:8861-8866, Ding, E., et al. (2002) Mol. Ther. 5:436-446, Fraites, T. J., et al., (2002) Mol. Ther. 5:571-578, Tsujino, S., et al. (1998) Hum. Gene Ther. 9:1609-1616).

[0006] MYOZYME® (alglucosidase alfa) was the first US approved product (2006) for the treatment of Pompe disease; LUMIZYME® (alglucosidase alfa) was approved in 2010 and is the current standard-of-care (SOC) treatment for infantile-onset and late-onset Pompe patients. Alglucosidase alfa is administered intravenously every 2 weeks as an infusion at a dose of 20 mg/Kg (LUMIZYME Prescribing Information 2014). Alglucosidase alfa provides an exogenous source of GAA. Binding to mannose-6-phosphate receptors on the cell surface has been shown to occur via carbohydrate groups on the GAA molecule, after which it is internalized and transported into lysosomes, where it undergoes proteolytic cleavage that results in increased enzymatic activity. It then exerts enzymatic activity in cleaving glycogen. Although this enzyme replacement therapy (ERT) prolongs survival in most patients with infantile Pompe disease, a subset have either died, suffered ongoing muscle weakness or remained profoundly hypotonic requiring mechanical ventilator support despite compliance with SOC ERT. For late-onset patients, ERT moderately improves muscle function and pulmonary function parameters, initially, followed by stable function or decline and remains far from an ideal therapy (Schoser et al. 2017).

[0007] For infantile-onset patients, especially those with severe or null mutations (cross-reacting immune material [CRIM])-negatives), high and sustained anti-rhGAA Immunoglobulin G (IgG)-mediated immunity against the GAA enzyme is a primary reason for impaired or inadequate response to ERT. That is, ERT is known to provoke an antibody response in the form of both IgG and IgE and can also lead to infusion-associated reactions (Kishnani et al. 2007; Kishnani et al. 2010). Current practice is to initiate immune modulation with ERT for patients with LOPD at risk for antibody formation.

[0008] Additionally, enzyme replacement therapy (ERT) with alglucosidase alfa (MYOZYME®/LUMIZYME®) is delivered as an onerous every other week, or weekly infusion, and is the only treatment currently available. For those with infantile-onset Pompe disease (IOPD), GAA is absent (CRIM negative) or minimal (˜1% of normal) and causes rapidly progressive cardiorespiratory failure and death by the age of 2 years if left untreated (Parini et al. 2018). Subjects with a marked deficiency of GAA present as juveniles or adults (Late-Onset Pompe disease [LOPD]) with less severe symptoms and slower progression. Moreover, missing biweekly treatments can result in significant setbacks requiring many months of ERT to return to the same levels.

[0009] Accordingly, despite temporary therapeutic success, alglucosidase alfa ERT leaves a clear unmet medical need in both IOPD and LOPD. Longitudinal data in subjects confirm that ERT does not lead to complete correction or normalization of patients with Pompe disease. Ultimately subjects typically still decline, albeit at a slower rate, delaying the inevitable progression to death (Kuperus et al. 2017; Parini et al. 2018). While alglucosidase alfa prolongs survival for subjects with both IOPD and LOPD (LUMIZYME Prescribing Information, 2014) the antibody responses to the GAA and decline in effect poses several drawbacks.

[0010] Therefore, from a clinical perspective, long-term treatment of Pompe patients with ERT has had limited success. In the IOPD subset of patients, many experience high, sustained anti-rhGAA antibody titers (HSAT). Pompe patients who lack any residual GAA protein are deemed CRIM-negative. CRIM negative patients develop HSAT, and a subset of CRIM positive patients who also develop high or sustained intermediate titers suffer greatly increased mortality (Banugaria et al. 2011). Furthermore, the use of immunosuppression to prevent antibody formation in patients at risk for HSAT significantly prolonged survival and confirmed the clinical relevance of HSAT (Mendelsohn et al. 2009; Banugaria et al. 2011). Moreover, literature indicates that only about ˜1% of ERT is pharmacologically active.

[0011] Therefore, while enzyme therapy has demonstrated reasonable efficacy for severe infantile GSD II, the benefit of GAA enzyme therapy is limited by the need for frequent infusions as well as the subject developing inhibitor or neutralizing antibodies against recombinant hGAA protein (Amalfitano, A., et al. (2001) Genet. In Med. 3:132-138), there is a need for improved methods and alternative therapies to treat patients with Pompe disease. Adeno-associated virus (AAV) vector-mediated gene transfer provides an appropriate and feasible alternative.

### SUMMARY OF THE INVENTION

[0012] The technology described herein relates generally to a recombinant adenovirus associated (rAAV) vector comprising in its genome: (a) 5′ and 3′ AAV inverted terminal repeats (ITR) sequences, and (b) located between the 5′ and 3′ ITRs, a heterologous nucleic acid sequence encoding all or a portion of an endogenous GAA signal peptide, a heterologous signal peptide and an alpha-glucosidase (GAA) polypeptide, wherein the GAA polypeptide comprises amino acid residues 28-952 of SEQ ID NO: 1, 57-952 of SEQ ID NO: 1, or comprises a N-terminal GAA polypeptide fragment, such as comprising amino acids 28, 28-29, 28-30, 28-31, 28-32, or 28-33 of SEQ ID NO: 1 and a deletion of any number of amino acids from the next about 5 amino acids to about 40 amino acids after the N terminal GAA polypeptide fragment of SEQ ID NO: 1, and wherein the heterologous signal peptide can be inserted immediately at or after the N-terminal GAA polypeptide fragment and before the remaining amino acids of the GAA polypeptide, e.g., wherein the heterologous signal peptide is optionally fused at position 57 of the remaining amino acids of the GAA polypeptide, and where the GAA polypeptide can extend to amino acid 952 of SEQ ID NO: 1, or a functional fragment thereof, and wherein the nucleic acid sequence encoding the GAA polypeptide can be codon optimized, and wherein the heterologous nucleic acid is operatively linked to a liver-specific promoter. In certain embodiments, the homologous GAA signal peptide or a fragment thereof can be present.

[0013] A recombinant adenovirus associated (rAAV) vector comprising in its genome: (a) 5′ and 3′ AAV inverted terminal repeats (ITR) sequences, and (b) located between the 5′ and 3′ ITRs, optionally, a heterologous nucleic acid sequence encoding all or a portion of an endogenous GAA signal peptide, a heterologous signal peptide and an alpha-glucosidase (GAA) polypeptide, wherein the GAA polypeptide comprises amino acid residues 28-952 of SEQ ID NO: 1, amino acids 57-952 of SEQ ID NO: 1, or comprises a N-terminal GAA polypeptide fragment, for example, comprising amino acids 28, 28-29, 28-30, 28-31, 28-32, or 28-33 of SEQ ID NO: 1 and a deletion can be any number of amino acids from about 5 amino acids to about 40 amino acids after the N terminal GAA polypeptide fragment of SEQ ID NO: 1, and wherein the heterologous signal peptide can be inserted immediately before the remaining amino acids of the GAA polypeptide. In one embodiment, the heterologous signal peptide is optionally fused at position 57 of the remaining amino acids of the GAA polypeptide, and where the GAA polypeptide can extend to amino acid 952 of SEQ ID NO: 1, or a functional fragment thereof, and wherein the nucleic acid sequence encoding the GAA polypeptide can be wild-type or codon optimized, and wherein the heterologous nucleic acid is operatively linked to a liver-specific promoter.

[0014] In some embodiments, the nucleic acid sequence that encodes an endogenous GAA-signal peptide encodes at least 1-5, or at least 1-10, or at least 1-20, or at least about 1-23, or at least about 1-24, or at least about 1-25, or at least about 1-26, or at least about 1-27 concecutive amino acids of the endogenous GAA signal peptide of SEQ ID NO: 59. In some embodiments, the nucleic acid sequence encoding an GAA-signal peptide encodes a modified GAA signal peptide that comprises a deletion of at least 1, or at least 2, or at least 3, or at least 4, or at least 5, or at least 6, or at least 7, or at least 8, or at least 9, or at least 10, or at least 11, or at least 12, or at least 13, or at least 14, or at least 15, or at least 16, or at least 17, or at least 18, or at least 19, or at least 20 amino acids of SEQ ID NO: 59, where the deletions can be concecutive, or non-concecutive deletions.

[0015] In some embodiments, the nucleic acid sequence that encodes a GAA-signal peptide encodes at least 1-5, or at least 1-10, or at least 1-20, or at least about 1-23, or at least about 1-24, or at least about 1-25, or at least about 1-26, or at least about 1-27 concecutive amino acids of the endogenous GAA signal peptide.

[0016] In one embodiment of any aspect herein, there is codon optimized nucleic acid sequence encoding the GAA polypeptide is selected from the group consisting of SEQ ID NO: 1-18, or functional fragment thereofs.

[0017] In one embodiment of any aspect herein, the nucleic acid encoding SEQ ID NO: 3 is wildtype.

[0018] In one embodiment of any aspect herein, the vector comprises the nucleic acid sequence of SEQ ID NO: 23, or a functional variant thereof.

[0019] In one embodiment of any aspect herein, the heterologous nucleic acid sequence encodes a GAA protein comprising a signal peptide fused to the GAA polypeptide, wherein the signal peptide is an endogenous GAA signal peptide, or a heterologous signal peptide, or a combination thereof.

[0020] In one embodiment of any aspect herein, the AAV genome comprises, in the 5′ to 3′ direction: (a) a 5′ ITR, (b) a liver-specific promoter sequence, (c) an 5′ UTR sequence, (d) a nucleic acid encoding a portion or all of the endogenous GAA signal peptide, (e) a nucleic acid encoding a heterologous signal peptide or the N-terminal GAA polypeptide fragment, (f) a nucleic acid encoding an alpha-glucosidase (GAA) polypeptide, wherein the GAA polypeptide can be whole or a fragment thereof that is functionally active, (g) a poly A sequence, and (h) a reverse RNA pol II terminator sequence.

[0021] In one embodiment of any aspect herein, wherein the vector further comprises at least one of a UTR or a reverse RNA polII terminator sequence.

[0022] In one embodiment of any aspect herein, the UTR is 5′ or 3′.

[0023] In one embodiment of any aspect herein, the nucleic acid encoding the signal peptide encodes a signal sequence is selected from any of: an endogenous GAA signal peptide, a fibronectin signal peptide (FN1), a IL-2 wt signal peptide, modified IL-2 signal peptide, IL2(1-3) signal peptide, IgG signal peptide, a AAT signal peptide, a A2M signal peptide, or a PZP signal peptide, or an active fragment thereof having signal peptide activity.

[0024] In one embodiment of any aspect herein, the nucleic acid sequence encodes a GAA polypeptide having the amino acid sequence of SEQ ID NO: 1, or a polypeptide having at least 80% sequence identity to SEQ ID NO: 1 where amino acid residue 199 is a R (199R), amino acid residue 223 is a H (223H) and amino acid residue 780 is a I (780I).

[0025] In one embodiment of any aspect herein, the nucleic acid sequence encoding the GAA polypeptide is SEQ ID NO: 3, or a nucleic acid sequence having at least 80%, or at least 85%, or at least 90% sequence identity to SEQ ID NO: 3 that encodes a GAA polypeptide having at least 80% sequence identity to SEQ ID NO: 1 where amino acid residue 199 is a R (199R), amino acid residue 223 is a H (223H) and amino acid residue 780 is a I (780I).

[0026] In one embodiment of any aspect herein, the 5′ UTR sequence comprises SEQ ID NO: 41, or a nucleic acid having at least 80% sequence identity to SEQ ID NO: 41.

[0027] In one embodiment of any aspect herein, the 5′ UTR sequence comprises SEQ ID NO: 40, or a nucleic acid having at least 80% sequence identity to SEQ ID NO: 40.

[0028] In one embodiment of any aspect herein, the vector further comprises an intron sequence located 5′ of the nucleic acid sequence encoding the signal peptide, and 3′ of the promoter.

[0029] In one embodiment of any aspect herein, the intron sequence is selected from the group consisting of: MVM sequence, a HBB2 sequence, an CMVIE intron sequence, or a UBC intron sequence or a SV40 sequence.

[0030] In one embodiment of any aspect herein, the GAA polypeptide is a N-terminal truncated GAA polypeptide selected from any disclosed in Table 1.

[0031] In one embodiment of any aspect herein, the vector further comprises at least one polyA sequence located 3′ of the nucleic acid encoding the GAA gene and 5′ of the 3′ ITR sequence.

[0032] In one embodiment of any aspect herein, the heterologous nucleic acid sequence further comprises a 3′ UTR sequence, wherein the 3′ UTR sequence is located 3′ of the nucleic acid encoding the GAA polypeptide and 5′ of the 3′ ITR sequence, or is located between the nucleic acid encoding a GAA polypeptide and the poly A sequence, and can also comprise a RNA pol II terminator sequence.

[0033] In one embodiment of any aspect herein, the heterologous nucleic acid sequence further comprises a 3′ intron sequence, wherein the 3′ intron sequence is located 3′ of the nucleic acid encoding the GAA polypeptide and 5′ of the 3′ ITR sequence, or is located between the nucleic acid encoding the GAA polypeptide and a poly A sequence and/or a RNA polII terminator sequence.

[0034] In one embodiment of any aspect herein, the ITR comprises an insertion, deletion or substitution.

[0035] In one embodiment of any aspect herein, one or more CpG islands in the ITR are removed.

[0036] In one embodiment of any aspect herein, the nucleic acid encoding the signal peptide is selected from any of the group consisting of: AAT signal peptide (e.g., SEQ ID NO: 67), or an active fragment thereof having secretory signal activity, e.g., a nucleic acid encoding an amino acid sequence that has at least about 75%, or 80%, or 85%, or 90%, or 95%, or 98%, or 99% sequence identity to SEQ ID NO: 67; a fibronectin signal peptide (FN1) (e.g., SEQ ID NO: 73-75), or an active fragment thereof having secretory signal activity, e.g., a nucleic acid encoding an amino acid sequence that has at least about 75%, or 80%, or 85%, or 90%, or 95%, or 98%, or 99% sequence identity to SEQ ID NO: 73-75; an endogenous GAA signal peptide (SEQ ID NO: 51), or an active fragment thereof having secretory signal activity, e.g., a nucleic acid encoding an amino acid sequence that has at least about 75%, or 80%, or 85%, or 90%, or 95%, or 98%, or 99% sequence identity to SEQ ID NO: 51; an hIGF2 signal peptide (e.g., SEQ ID NO: 72), or an active fragment thereof having secretory signal activity, e.g., a nucleic acid encoding an amino acid sequence that has at least about 75%, or 80%, or 85%, or 90%, or 95%, or 98%, or 99% sequence identity to SEQ ID NO: 72; a IgG1 (201) signal peptide (SEQ ID NO: 54), or an active fragment thereof having secretory signal activity, e.g., a nucleic acid encoding an amino acid sequence that has at least about 75%, or 80%, or 85%, or 90%, or 95%, or 98%, or 99% sequence identity to SEQ ID NO: 54; wtIL2 leader peptide (SEQ ID NO: 55), or an active fragment thereof having secretory signal activity, e.g., a nucleic acid encoding an amino acid sequence that has at least about 75%, or 80%, or 85%, or 90%, or 95%, or 98%, or 99% sequence identity to SEQ ID NO: 55; mutant IL2 leader peptide (SEQ ID NO: 56) or an active fragment thereof having secretory signal activity, e.g., a nucleic acid encoding an amino acid sequence that has at least about 75%, or 80%, or 85%, or 90%, or 95%, or 98%, or 99% sequence identity to SEQ ID NO: 56; and the nucleic acid encoding the GAA polypeptide is selected from any of the group consisting of: SEQ ID NO: 3, SEQ ID NO: 4, SEQ ID NO: 5, SEQ ID NO: 6, SEQ ID NO: 7, SEQ ID NO: 8, SEQ ID NO: 9, SEQ ID NO: 10, SEQ ID NO: 11, SEQ ID NO: 12, SEQ ID NO: 13, SEQ ID NO: 14, SEQ ID NO: 15, SEQ ID NO: 16, SEQ ID NO: 17, SEQ ID NO: 18 or a nucleic acid sequence having at least 60%, or 70%, or 80%, 85% or 90% or 95%, or 98%, or 99% sequence identity to SEQ ID NOS: 1-18.

[0037] In one embodiment of any aspect herein, the nucleic acid encoding the GAA polypeptide is selected from SEQ ID NO: 3 or fragment thereof having functional GAA activity, or a nucleic acid sequence having at least 60%, or 70%, or 80%, 85% or 90% or 95%, or 98%, or 99% sequence identity to SEQ ID NO: 3 which encodes a GAA polypeptide at least 85% sequence identity to SEQ ID NO: 1 where amino acid residue 199 is a R (199R), amino acid residue 223 is a H (223H) and amino acid residue 780 is a I (780I).

[0038] In one embodiment of any aspect herein, the nucleic acid encoding the GAA polypeptide encodes a GAA polypeptide beginning at any of amino acid residues 35, 40, 50, 57, 60, 68, 69, 70, 72, 74, 779, 790, 791, 792, 793, or 796 of SEQ ID NO: 1 or a sequence 80% identical to SEQ ID NO: 1 where amino acid residue 199 is a R (199R), amino acid residue 223 is a H (223H) and amino acid residue 780 is a I (780I).

[0039] In one embodiment of any aspect herein, the GAA polypeptide has an endogenous GAA signal peptide or fragment thereof attached, and a heterologous signal peptide attached to or after the N-terminal of the GAA polypeptide, wherein the endogenous signal peptide has the amino acid sequence of SEQ ID NO: 59 or a sequence at least 80% sequence identity to SEQ ID NO: 59, and the heterologous signal peptide is selected from the group consisting of: SEQ ID NO: 60 (201 IgG signal peptide), or an IL2 wild type signal peptide (SEQ ID NO: 61), modified IL2 signal peptide (SEQ ID NO: 62), A2M signal peptide (SEQ ID NO: 63), or PZP signal peptide (SEQ ID NO: 64), or artificial signal peptide (SEQ ID NO: 65), or cathpetsin L signal peptide (SEQ ID NO: 66) or signal peptides at least 90% sequence identity to SEQ ID NOS: 60-66.

[0040] In one embodiment of any aspect herein, the liver specific promoter is selected from any of: SEQ ID NOS: 86, 88, 91-96, 146-150 or 439-441, or a liver specific promoter having at least 80% sequence identity to SEQ ID NOs: 86, 88, 91-96, 146-150 or 439-441.

[0041] In one embodiment of any aspect herein, the liver specific promoter is selected from any of: SEQ ID NOS: 98 or 99, or a liver specific promoter having at least 80% sequence identity to SEQ ID NOs: 98 or 99.

[0042] In one embodiment of any aspect herein, the liver specific promoter is SEQ ID NOS: 97, or a liver specific promoter having at least 80% sequence identity to SEQ ID NO: 97.

[0043] In one embodiment of any aspect herein, the recombinant vector is manufactured from the plasmid of SEQ ID NO: 27.

[0044] In one embodiment of any aspect herein, the nucleic acid comprises SEQ ID NO: 25, or a functional fragment thereof.

[0045] In one embodiment of any aspect herein, the recombinant AAV vector is a chimeric AAV vector, haploid AAV vector, a hybrid AAV vector or polyploid AAV vector.

[0046] In one embodiment of any aspect herein, the recombinant AAV vector is a rational haploid vector, a mosaic AAV vector, a chemically modified AAV vector, or a AAV vector from any AAV serotypes.

[0047] In one embodiment of any aspect herein, the recombinant AAV vector is selected from the group consisting of: a AAVXL32 vector, a AAVXL32.1 vector, a AAV8 vector, or a haploid AAV8 vector comprising at least one AAV8 capsid protein. In one embodiment of any aspect herein, the serotype is AAV3b. In one embodiment of any aspect herein, the AAV3b serotype comprises one or mutations in a capsid protein selected from any of: 265D, 549A, Q263Y. In one embodiment of any aspect herein, the AAV3b serotype is selected from any of: AAV3b265D, AAV3b265D549A, AAV3b549A or AAV3bQ263Y, or AAV3bSASTG.

[0048] In one embodiment of any aspect herein, the poly A sequence is a full length HGF poly A sequence. In one embodiment, it can be a functional fragment of the hGH polyA sequence.

[0049] In one embodiment of any aspect herein, the poly A sequence is selected from SEQ ID NO: 42, 43 or 44, or a nucleic acid sequence at least 80% sequence identity to SEQ ID NOS: 42-44.

[0050] In one embodiment of any aspect herein, the reverse RNA pol II terminator sequence comprises SEQ ID NO: 45, or a nucleic acid sequence at least 80% sequence identity to SEQ ID NO: 45. In one embodiment, it is those sequences.

[0051] Another aspect described herein provides a pharmaceutical composition comprising any of the recombinant AAV vectors described herein in a pharmaceutically acceptable carrier.

[0052] Another aspect described herein provides a method to treat a subject with Pompe Disease, or a glycogen storage disease type II (GSD II, Acid Maltase Deficiency) or having a deficiency in alpha-glucosidase (GAA) polypeptide, comprising administering any of the recombinant AAV vector, or any of the rAAV genome or nucleic acid sequence described herein to the subject.

[0053] In one embodiment of any aspect herein, the AAV vector manufactured from the plasmid of SEQ ID NO: 27.

[0054] In one embodiment of any aspect herein, the recombinant AAV vector comprises the nucleic acid sequence of SEQ ID NO: 3, or a functional fragment thereof.

[0055] In one embodiment of any aspect herein, the recombinant AAV vector comprises the nucleic acid sequence of SEQ ID NO: 23, or a functional variant thereof.

[0056] In one embodiment of any aspect herein, the GAA polypeptide is secreted from the subject's liver and there is uptake of the secreted GAA by skeletal muscle tissue, cardiac muscle tissue, diaphragm muscle tissue or a combination thereof, wherein uptake of the secreted GAA results in a reduction in lysosomal glycogen stores in the tissue(s).

[0057] In one embodiment of any aspect herein, the administering to the subject is selected from any of: intramuscular, sub-cutaneous, intraspinal, intracisternal, intrathecal, intravenous administration.

[0058] In one embodiment of any aspect herein, the recombinant AAV vector is a chimeric AAV vector, haploid AAV vector, a hybrid AAV vector or polyploid AAV vector.

[0059] In one embodiment of any aspect herein, the recombinant AAV vector is a rational haploid vector, a mosaic AAV vector, a chemically modified AAV vector, or a AAV vector from any AAV serotypes.

[0060] In one embodiment of any aspect herein, the recombinant AAV vector is a AAVXL32 vector or a AAVXL32.1 vector or a AAV8 vector, or a haploid AAV8 vector comprising at least one AAV8 capsid protein.

[0061] In one embodiment of any aspect herein, the recombinant AAV vector is a AAV8 vector.

[0062] In one embodiment of any aspect herein, the recombinant AAV vector is administered at a dosage range of between 1.0E9 vg/kg and 5.0E13 vg/kg. For example, 1.0E9 vg/kg and 5.0E12 vg/kg; 5.0E9 vg/kg and 5.0E12 vg/kg; 5.0E9 vg/kg and 1.0E12 vg/kg; 5.0E9 vg/kg and 5.0E11 vg/kg; 5.0E9 vg/kg and 5.0E10 vg/kg; and 1.0E9 vg/kg and 1.0E10 vg/kg.

[0063] In one embodiment of any aspect herein, the method further comprises receiving GAA protein enzyme replacement therapy, and withdrawing GAA protein enzyme replacement therapy (ERT) on the same day, a day after or, any time between day 1 and 26 weeks after administration of the recombinant AAV vector.

[0064] Another aspect described herein provides a nucleic acid construct comprising SEQ ID NO: 3, or a nucleic acid sequence at least 80% sequence identity to SEQ ID NOS: 3.

[0065] In one embodiment of any aspect herein, the expression of the nucleic acid sequence of SEQ ID NO: 3 or a nucleic acid having 80% sequence identity thereto encodes a GAA polypeptide having at least 80% sequence identity to SEQ ID NO: 1 and wherein there is R at position 199, a H at position 223 and I at position 780.

[0066] Another aspect described herein provides a nucleic acid construct comprising SEQ ID NO: 23, or a nucleic acid sequence at least 80% sequence identity to SEQ ID NO: 23.

[0067] In one embodiment of any aspect herein, the nucleic acid comprises SEQ ID NO: 3 or SEQ ID NO: 25, or a nucleic acid sequence at least 80% sequence identity to SEQ ID NOS: 3 or 25.

[0068] In one embodiment of any aspect herein, the expression of the nucleic acid sequence of SEQ ID NO: 3 or a nucleic acid having 80% sequence identity thereto encodes a GAA polypeptide having at least 80% sequence identity to SEQ ID NO: 1 and wherein there is R at position 199, a H at position 223 and I at position 780.

[0069] Another aspect described herein provides a recombinant AAV comprising any of the nucleic acid constructs described herein.

[0070] In one embodiment of any aspect herein, the AAV lacks at least 1 amino acids of the GAA N terminus.

[0071] In one embodiment of any aspect herein, the AAV lacks at least 5, 10, 15, 20, 25, 30, 35, 40, 45, 50, 55 or more amino acids of the GAA N terminus.

[0072] In one embodiment of any aspect herein, the heterologous signal peptide is inserted immediately after the endogenous GAA signal peptide or a potion thereof.

[0073] Aspects of the present invention teach certain benefits in construction and use which give rise to the exemplary advantages described below. Other features and advantages of aspects of the present invention will become apparent from the following more detailed description, taken in conjunction with the accompanying drawings, which illustrate, by way of example, the principles of aspects of the invention.

### BRIEF DESCRIPTION OF THE DRAWINGS

[0074] This application file contains at least one drawing executed in color. Copies of this patent application publication with color drawings will be provided by the Office upon request and payment of the necessary fee. The accompanying drawings illustrate aspects of the present invention. In such drawings:

[0075] FIGS. 1A-1D show serum GAA protein quantification by western blot densitometry. Serum GAA protein was measured by western blot densitometry at week 1 (FIG. 1A), week 2 (FIG. 1B). week 3 (FIG. 1C) and week 4 (cardiac serum) (FIG. 1D). Serum GAA was normalized to total protein (A-D).

[0076] FIGS. 2A-2D show serum GAA activity by 4MU assay. Serum GAA activity was measured by 4MU assay at week 1 (FIG. 2A), week 2 (FIG. 2B). week 3 (FIG. 2C) and week 4 (cardiac serum) (FIG. 2D).

[0077] FIGS. 3A-3C show target organ GAA protein quantification by western blot densitometry. GAA protein was measured 4 weeks post dosing by western blot densitometry in Heart (FIG. 3A), Diaphragm (FIG. 3B) and Liver (FIG. 3C). GAA was normalized to total protein.

[0078] FIGS. 4A-4D show target organ GAA activity by 4MU assay. GAA activity was measured by 4MU assay 4 weeks post dosing in Heart (FIG. 4A), Diaphragm (FIG. 4B), Quad (FIG. 4C) and Liver (FIG. 4D).

[0079] FIGS. 5A-5D show target organ Glycogen content. Glycogen content was measured 4 weeks post dosing in Heart (FIG. 5A), Diaphragm (FIG. 5B), Quad (FIG. 5C) and Liver (FIG. 5D).

[0080] FIGS. 6A-6C show serum GAA protein quantification by western blot densitometry for 3-week sacrifice animals. Serum GAA protein was measured by western blot densitometry at week 1 (FIG. 6A), week 2 (FIG. 6B) and week 3 (FIG. 6C). Serum GAA was normalized to total protein.

[0081] FIGS. 7A-7C show serum GAA activity by 4MU assay for 3-week sacrifice animals. Serum GAA activity was measured by 4MU assay at week 1 (FIG. 7A), week 2 (FIG. 7B) and week 3 (FIG. 7C).

[0082] FIGS. 8A-8C show target organ GAA activity by 4MU assay for 3-week sacrifice animals. GAA activity was measured by 4MU assay 3 weeks post dosing in Heart (FIG. 8A), Diaphragm (FIG. 8B) and Liver (FIG. 8C).

[0083] FIGS. 9A-9C show target organ Glycogen content for 3-week sacrifice animals. Glycogen content was measured 3 weeks post dosing in Heart (FIG. 9A), Diaphragm (FIG. 9B) and Liver (FIG. 9C).

[0084] FIGS. 10A-10H show serum GAA protein quantification by western blot densitometry for 8-week sacrifice animals. Serum GAA protein was measured by western blot densitometry at week 1 (FIG. 10A), week 2 (FIG. 10B). week 3 (FIG. 10C) and week 4 (FIG. 10D), week 5 (FIG. 10E), week 6 (FIG. 10F), week 7 (FIG. 10G), week 8 (FIG. 10H). Serum GAA was normalized to total protein.

[0085] FIGS. 11A-11H show serum GAA activity by 4MU assay for 8-week sacrifice animals. Serum GAA activity was measured by 4MU assay at week 1 (FIG. 11A), week 2 (FIG. 11B). week 3 (FIG. 11C) and week 4 (FIG. 11D), week 5 (FIG. 11E), week 6 (FIG. 11F), week 7 (FIG. 11G), week 8 (FIG. 11H).

[0086] FIGS. 12A-12C show target organ GAA protein quantification by western blot densitometry for 8-week sacrifice animals. GAA protein was measured 8 weeks post dosing by western blot densitometry in Heart (FIG. 12A), Diaphragm (FIG. 12B), and Liver (FIG. 12C).

[0087] FIGS. 13A-13C show target organ GAA activity by 4MU assay for 8-week sacrifice animals. GAA activity was measured by 4MU assay 8 weeks post dosing in Heart (FIG. 13A), Diaphragm (FIG. 13B) and Liver (FIG. 13C).

[0088] FIGS. 14A-14F show target organ Glycogen content for 8-week sacrifice animals. Glycogen content was measured 8 weeks post dosing in Heart (FIGS. 14A, 14D), Diaphragm (FIGS. 14B, 14E) and Liver (FIGS. 14C, 14F) and expressed normalized to dose per kg body weight (FIGS. 14D-14F).

[0089] FIG. 15 shows a schematic of the Actus, M3 and M4 constructs. The Actus comprises the liver promoter of SEQ ID NO: 97, the M3 construct is similar to the M2 construct, with the M3 construct comprising the promoter of SEQ ID NO: 99, whereas the M2 construction comprises the promoter of SEQ ID NO: 98, which comprises mutations within the muscle transcription factor binding site. The coding sequence in the M3 construct was modified to remove predicted alternative open reading frames and known immune stimulatory hexanucleotide CpG motifs. In the M4 construct, all CG dinucleotide were removed from the entire coding sequence. Alternative frames were not removed in selected M4 constructs. Amino acid sequence is identical to sequence found in Actus 101 (myozyme/lumizyme amino acid sequence) across the M3 and M4 constructs.

[0090] FIGS. 16A and 16B show analyses of hGAA target tissue uptake. FIG. 16A shows expression of GAA activity (top graph) following administrations of M4 as compared to Actus 101 and a vehicle control (VC) in the liver, heart and diaphragm, as well as glycogen levels (bottom graph). FIG. 16B shows expression of GAA activity (top graph) following administrations of M4 from two different lots as compared to Actus 101 and a vehicle control (VC) in the liver, heart and diaphragm, as well as glycogen levels (bottom graph).

[0091] FIGS. 17A and 17B show analyses of serum hGAA expressed by Actus 101 and M4. FIG. 17A shows protein expression of hGAA expressed from Actus 101, M4, and a vehicle control (VC). hGAA protein is 2.48 fold higher when expressed from M4 as compared to Actus 101. FIG. 17B shows total protein of hGAA activity present in the serum following administrations of M4 from two different lots as compared to Actus 101 and a vehicle control (VC) 4 weeks post injection.

[0092] FIGS. 18A-18C show performance of wild type (pM3-NCBI) & Actus 101 hGAA proteins in mouse heart at 4 weeks post vector injection. FIG. 18A is a bar graph showing the hGAA uptake following administration of the indicated constructs. FIG. 18B is a bar graph showing the hGAA activity following administration of the indicated constructs. FIG. 18C is a bar graph showing the glycogen levels following administration of the indicated constructs. Actus 101 performs better than the M3 construct in mouse hGAA activity (FIG. 18B) and glycogen reduction (FIG. 18C) in heart; this is in stark contrast to the M4 construct, which performs better than Actus 101.

[0093] FIG. 19 shows 4MU activity assay for hGAA activity at 4 weeks post transduction in mouse sera with the indicated construct. M4 performs better that Actus 101 in promoting GAA activity.

[0094] FIG. 20 shows liver retention observed following injection with saline (control), Actus 101, or M4. Liver retention appeared to be comparable between Actus 101 and M4.

[0095] FIGS. 21A-21D show analyses of hGAA target tissue uptake. FIG. 21A shows expression of GAA activity following administrations of M4, Actus 101 and a saline control in the heart. FIG. 21B shows expression of GAA activity following administrations of M4, Actus 101 and a saline control in the diaphragm. FIG. 21C shows expression of GAA activity following administrations of M4, Actus 101 and a saline control in the quadriceps muscle. FIG. 21D shows expression of GAA activity following administrations of M4, Actus 101 and a saline control in the soleus muscle.

[0096] FIG. 22 presents western blots showing the hGAA expression from vehicle control (VC), Actus 101, and various M4 constructs, Seg12 (SEQ ID NO: 30), Seq99 (SEQ ID NO: 29), Seq3 (SEQ ID NO:28), and Seq100 (SEQ ID NO: 27) at 7, 14 and 21 days post infection. Low and high doses (as indicated) were administered to GAA-KO mice. Levels were assessed at the days indicated. Seq100 results in a higher expression level that persists for a longer period of time as compared to VC, Actus 101 and the other indicated M4 constructs. “H ST 1” and “H ST 2” refer to HIGH DOSE STUDY 1 and HIGH DOSE STUDY 2, respectively. SEQ ID NO: 27, 28, 29, 30 are the plasmids for expression of the rAAV vectors expressing a GAA polypeptide having the sequence of SEQ ID NO: 1, where the rAAV vectors comprise codon optimized nucleic acid sequences selected from: SEQ ID NO: 3 (Seq100), SEQ ID NO: 4 (Seq3), SEQ ID NO:7 (Seq12), SEQ ID NO:13 (Seq99).

[0097] FIG. 23 shows hGAA levels in GAA-KO mouse at 21 days post administration of the indicated constructs. Seq100 results in a higher expression level of hGAA in the sera (top western blot) and liver (bottom western blot) at 21 days post administration as compared to VC, Actus 101 and the other indicated M4 constructs.

[0098] FIG. 24 shows normalized hGAA RNA levels in the liver of GAA-KO mice at 21 days post administration with the indicated constructs. Seq100 results in a higher expression level of hGAA RNA in the sera at 21 days post administration as compared to VC, Actus 101 and the other indicated M4 constructs.

[0099] FIG. 25 presents a western blot showing GAA uptake in the indicated target tissue (i.e., heart or diaphragm) at 21 days post administration with the indicated constructs. Seq100 results in a higher expression level of hGAA in each tissue at 21 days post administration as compared to VC, Actus 101 and the other indicated M4 constructs.

[0100] FIGS. 26A and 26B present bar graphs showing GAA and glycogen levels in the indicated tissue of GAA-KO mice at 21 days post administration FIG. 26A shows GAA activity in the indicated tissue of GAA-KO mice at 21 days post administration with the indicated constructs. Seq100 results in a higher expression level of hGAA in each tissue at 21 days post administration as compared to VC, Actus 101 and the other indicated M4 constructs. FIG. 26B shows glycogen in the indicated tissue of GAA-KO mice at 21 days post administration mice with the indicated constructs. Seq100 results in a higher level of glycogen clearance in each tissue at 21 days post administration as compared to VC, Actus 101 and the other indicated M4 constructs.

[0101] FIG. 27 presents a western blot showing hGAA expression in GAA-KO mice over time. Seq100 results in a higher expression level of hGAA in at day 7 and 14 post administration as compared to VC, Actus 101 and the other indicated M4 constructs.

[0102] FIG. 28 presents a bar graph showing the results of a 4MU assay in GAA-KO mice 21 days post administration. Seq100 results in a higher expression level of hGAA in at day 21 post administration as compared to VC, Actus 101 and the other indicated M4 constructs.

[0103] FIG. 29 is a schematic that shows a number of modified GAAs, showing a construct comprising (i) a GAA-signal peptide, or portion thereof, and (ii) a heterologous signal peptide, attached to (iii) a GAA polypeptide. A N-terminal truncated GAA polypeptide beginning at amino acid 57 is shown as an exemplary GAA polypeptide, however, any N-terminal truncated GAA polypeptide disclosed in Table 1 can be used.

[0104] FIG. 30 presents a western blot showing hGAA expression in GAA-KO mice 4 weeks following administration of the indicated constructs. Black arrow indicates GAA expression. Gray triangle indicates a non-specific band.

[0105] FIG. 31 presents a bar graph showing total GAA protein in serum of GAA-KO mice 4 weeks following administration of the indicated constructs. Saline is used a control.

[0106] FIG. 32 presents a bar graph showing total GAA activity in serum of GAA-KO mice 4 weeks following administration of the indicated constructs. Saline is used a control. 4MU activity in the serum is consistent with GAA expression levels.

[0107] FIG. 33 presents a bar graph showing total GAA activity in the heart of GAA-KO mice 4 weeks following administration of the indicated constructs. Saline is used a control. 4MU activity in the heart is consistent with GAA expression levels and expression of the construct achieved wild-type levels.

[0108] FIG. 34 presents a bar graph showing total glycogen levels in the heart of GAA-KO mice 4 weeks following administration of the indicated constructs. Saline is used a control. Glycogen levels in the heart is consistent with GAA expression levels and expression of the construct achieved wild-type levels.

[0109] FIG. 35A presents a western blot showing total GAA activity in the liver of GAA-KO mice 4 weeks following administration of the indicated constructs. FIG. 35B presents a bar graph showing total GAA activity in the heart of GAA-KO mice 4 weeks following administration of the indicated constructs. Saline is used a control. Reduced retention of modified GAA in the liver is observed.

[0110] FIG. 36 presents a table showing the level of GAA in serum, GAA activity in serum and heart, glycogen level in heart, and GAA levels retained in liver in mice following administration of indicated AAV (left column).

[0111] FIG. 37 presents a schematic of modified constructs. Mod-Actus is the Actus construct modified to remove wtAAV DNA sequences 5′ and 3′ to the ITRs. Mod-P072 is the P072 construct modified to replace the 5′UTR with a 5′UTR+intron sequence, remove the 3′UTR, and add a SV40 bi-directional polyA sequence. Mod-P092 is the P092 construct modified to replace the 5′UTR with a 5′UTR+intron sequence, remove the 3′UTR, and add a SV40 bi-directional polyA sequence. Mod-072 and mod-092 are also modified to remove wtAAV DNA sequences 5′ and 3′ to the ITRs.

[0112] FIGS. 38A and 38B present bar graphs showing GAA expression in huh7 cell culture for indicated AAVs. FIG. 38A shows GAA activity in huh7 cell lysates. FIG. 38B shows GAA activity in huh7 cell supernatants. Mod-P072 secretes that highlest level of GAA into the supernatant. Mod-Actus promotes that highest GAA activity in cells.

[0113] FIGS. 39A-39C present data showing in vivo expression of indicated AAVs at various levels in wild type mice (C57BL/6J). FIG. 39A is a graph showing GAA activity in serum at various weeks post administration in male mice. FIG. 39B is a graph showing GAA activity in serum at various weeks post administration in female mice. FIG. 39C is a graph showing GAA activity in serum at various weeks post administration in male and female mice (total). Mod-P072 achieves the highest GAA activity levels in serum of mice 4 weeks post administration.

[0114] FIGS. 40A-40C present bar graphs representing semi-quantitative analysis of GAA level western blots in liver, heart and quadriceps tissue following in vivo expression of indicated AAVs at various levels in wild type mice (C57BL/6J). FIG. 40A is a graph showing GAA levels in liver tissue in male and female mice. FIG. 40B is a graph showing GAA levels in heart tissue in male and female mice. FIG. 40C is a graph showing GAA levels in quadriceps tissue in male and female mice. Mod-Actus achieves the highest GAA uptake in liver tissue post administration. Mod-P072 achieves the highest GAA uptake in heart and quadriceps tissue post administration.

[0115] FIG. 41 present a bar graph glycogen levels in heart tissue following administration of Actus 101, pP110, and pP113 at the indicated dose. A greater reduction in glycogen in the cells was observed following administration of pP110 as compared to Actus 101 or pP113. Saline is used a control.

[0116] FIG. 42 present a bar graph glycogen levels in heart tissue following administration of M4, pP065, pP072 and pP092 at the indicated dose. Higher doses of pP065 and pP072 resulted in the greatest reduction of glycogen levels in the cell. Saline is used a control.

[0117] The above described figures illustrate aspects of the invention in at least one of its exemplary embodiments, which are further defined in detail in the following description. Features, elements, and aspects of the invention that are referenced by the same numerals in different figures represent the same, equivalent, or similar features, elements, or aspects, in accordance with one or more embodiments.

### DETAILED DESCRIPTION

[0118] The technology described herein is directed to recombinant AAV (rAAV) vectors and constructs for rAAV for delivering a GAA polypeptide to a subject in the methods to treat Pompe Disease, where the heterologous nucleic acid encoding GAA polypeptide is codon optimized to reduce an immune response and for enhanced and improved efficiency of expression in human subjects. That is, the rAAV constructs described herein for delivering a GAA polypeptide to a subject comprise improvements, such as but not limited to, a codon optimized nucleic acid sequence encoding a GAA polypeptide, where the codon optimized nucleic acid sequence encoding the GAA polypeptide is modified include features for example, (i) enhanced expression in vivo, (ii) to reduce CpG islands and/or to eliminate CG dinucleotide content, (iii) modification of STOP sequences or elimination of alternative reading frames (ARF), and (iv) to reduce the innate immune response. Or using a wildtype GAA modified to enhance expression. Furthermore, the rAAV constructs described herein for delivering a GAA polypeptide to a subject comprise improvements such as, e.g., incorporation of a 5′ UTR located between the nucleic acid expressing the GAA polypeptide and the liver specific promoter, and use of specific terminator sequences 3′ nucleic acid expressing the GAA polypeptide, such as, e.g., specific poly A sequences and/or terminator sequences, multiple polyA sequences, etc.

[0119] The technology described herein relates to improved recombinant AAV (rAAV) vectors and constructs for rAAV for delivering a GAA polypeptide to a subject in the methods to treat Pompe Disease to those previously disclosed in International Patent Application WO2020102645 and WO2021102107, both of which are incorporated herein in their entirety by reference.

[0120] In particular, described herein are targeted viral vectors, e.g., using rAAV vectors as an exemplary example, that comprise a nucleotide sequence containing inverted terminal repeats (ITRs), a liver specific promoter, a heterologous gene, a poly-A tail and potentially other regulator elements for use to treat Pompe disease, where the heterologous gene is human GAA, and wherein the vector, e.g., rAAV can be administered to a patient in a therapeutically effective dose that is delivered to the appropriate tissue and/or organ for expression of the heterologous gene and treatment of the disease, e.g., Pompe disease.

[0121] One aspect described herein provides a recombinant adenovirus associated (AAV) vector comprising in its genome: (a) 5′ and 3′ AAV inverted terminal repeats (ITR) sequences, and (b) located between the 5′ and 3′ ITRs, a heterologous nucleic acid sequence encoding a polypeptide comprising an alpha-glucosidase (GAA) polypeptide, wherein the heterologous nucleic acid is operatively linked to a liver-specific promoter as disclosed herein.

[0122] In one embodiment of any aspect herein, the heterologous nucleic acid sequence encodes a GAA polypeptide comprising a secretory signal fused to the GAA polypeptide, wherein the secretory signal (also referred to herein as “signal peptide”) is the endogenous GAA polypeptide, or an exogenous GAA polypeptide.

[0123] In one embodiment of any aspect herein, the nucleic acid sequence encoding the GAA polypeptide is the human GAA gene or a human codon optimized GAA gene (coGAA) or a modified GAA nucleic acid sequence. As disclosed herein, the nucleic acid encoding the human GAA protein is selected from any of SEQ ID NO: 1-18, or a functional variant having least 80%, or at least about 85%, or at least about 90%, or at least about 95%, or at least about 98% sequence identity to any of SEQ ID NO: 1-18.

[0124] In some embodiments, GAA expressed that comprises at least a signal peptide that promotes secretion of GAA polypeptide from the liver. In some embodiments, the GAA polypeptide, or modified GAA, is expressed as a fusion protein comprising at least a signal peptide that promotes secretion of the GAA polypeptide from the liver.

[0125] In all aspects of all embodiments of the technology described herein, the liver specific promoter expresses the hGAA polypeptide preferentially in the liver. In all aspects of all embodiments of the technology described herein, in some embodiments where the AAV vector comprises at least one capsid protein targeting the liver.

### I. Recombinant AAV Expressing GAA

[0126] As disclosed herein, one aspect of the technology relates to a method to treat Pompe disease using a rAAV vector comprising a capsid, and within its capsid, a nucleotide sequence referred to as the “rAAV vector genome”. The rAAV vector genome (also referred to as “rAAV genome) includes multiple elements, including, but not limited to two inverted terminal repeats (ITRs, e.g., the 5′-ITR and the 3′-ITR), and located between the ITRs are additional elements, including a promoter, a heterologous gene encoding a GAA polypeptide and a poly-A tail, where the heterologous gene encoding a GAA polypeptide is codon optimized, e.g., including but not limited to, reducing CpGs, reduced CpG islands, and minimizing or eliminating internal start codons.

[0127] In some embodiments, the rAAV genome disclosed herein comprises a 5′ ITR and 3′ ITR sequence, and located between the 5′ITR and the 3′ ITR, a promoter, e.g., a liver specific promoter sequence as disclosed herein, which operatively linked to a heterologous nucleic acid encoding a nucleic acid encoding an alpha-glucosidase (GAA) polypeptide, where the heterologous nucleic acid is codon optimized as disclosed herein, and where there is a 5′ UTR located between the nucleic acid encoding a GAA polypeptide and the liver specific promoter sequence. In some instances, there is also a 3′ UTR. Further, the UTR can contain an intron. In one embodiment, the heterologous nucleic acid sequence can optionally further comprise one or more of the following elements: an intron sequence, a nucleic acid encoding a secretory signal peptide, which can be an endogenous signal peptide (SP) or a heterologous SP as disclosed herein, a poly A sequence, and a terminator sequence. In some embodiments, the 5′ UTR sequence comprises SEQ ID NO: 41, or comprises SEQ ID NO: 40, or a sequence having at least 85%, or at least 90% or more sequence identity to SEQ ID NOs: 40 or 41. In some embodiments, the poly A sequence is a full length HGH poly A sequence comprising SEQ ID NO: 42, or a sequence having at least 85%, or at least 90% or more sequence identity to SEQ ID NO: 42. In some embodiments, the terminator sequence is a reverse RNA pol II terminator sequence. In some embodiments, a reverse RNA pol II terminator sequence comprises sequence SEQ ID NO: 45, or a sequence having at least 85%, or at least 90% or more sequence identity to SEQ ID NO: 45.

[0128] In some embodiments, the nucleic acid encoding an alpha-glucosidase (GAA) polypeptide encodes a full-length GAA polypeptide, e.g., beginning at residue 28 of SEQ ID NO: 1. In some embodiments, the nucleic acid encoding an alpha-glucosidase (GAA) polypeptide encodes a truncated GAA polypeptide, such as, for example, beginning at amino acid residues 35, 40, 50, 57, 60, 68, 69, 70, 72, 74 and/or a C-terminal truncation beginning at residues 779, 790, 791, 792, 793 and 796 of SEQ ID NO: 1, or a GAA polypeptide that has at least 80%, or at least 85%, or at least 90% or at least 95% sequence identity to SEQ ID NO: 1 over the amino acid residues 35-952, 40-952, 50-952, 57-952, 60-952, 68-952, 69-952, 70-952, 72-952, 74-952, 779-952, 790-952, 791-952, 792-952, 793-952 and 796-952 of SEQ ID NO: 1.

[0129] In some embodiments, the nucleic acid encoding an alpha-glucosidase (GAA) polypeptide encodes a full-length GAA polypeptide (e.g., residues 28-952 of SEQ ID NO: 1), or a truncated GAA polypeptide, e.g., a GAA polypeptide beginning at any of residues 35, 40, 50, 57, 60, 68, 69, 70, 72, 74 of SEQ ID NO: 1 and/or a second truncation starting at residues 779, 790, 791, 792, 793 and 796 of SEQ ID NO: 1) that has an endogenous GAA signal peptide attached to the N-terminal of the GAA polypeptide, e.g., comprises endogenous signal peptide comprising residues of SEQ ID NO: 59. For example, SEQ ID NO: 1 and only a heterologous or homologous signal peptide. In alternative embodiments, the nucleic acid encoding an alpha-glucosidase (GAA) polypeptide encodes a full-length GAA polypeptide (e.g., residues 28-952 of SEQ ID NO: 1), or a truncated GAA polypeptide, e.g., a GAA polypeptide beginning at any of residues 35, 40, 50, 57, 60, 68, 69, 70, 72, 74, 779, 790, 791, 792, 793 and 796 of SEQ ID NO: 1, that has a heterologous signal peptide attached to the N-terminal of the full-length, or truncated GAA polypeptide.

[0130] In alternative embodiments, the nucleic acid encoding an alpha-glucosidase (GAA) polypeptide encodes a full-length GAA polypeptide (e.g., residues 28-952 of SEQ ID NO: 1), or a N-terminal truncated GAA polypeptide, e.g., a GAA polypeptide beginning at any of residues 35, 40, 50, 57, 60, 68, 69, 70, 72, 74, 779, 790, 791, 792, 793 and 796 of SEQ ID NO: 1, and also encodes a GAA-signal peptide or a portion or fragment thereof, and a heterologous signal peptide attached to the N-terminal of the full-length, or truncated GAA polypeptide. In some embodiments, the GAA polypeptide is a N-terminal truncated GAA polypeptide, with the truncation beginning at any amino acids 29-35 of SEQ ID NO: 1. In some embodiments, the nucleic acid encoding an alpha-glucosidase (GAA) polypeptide comprises (i) a GAA-signal peptide, or a portion thereof, e.g., a N-terminal portion thereof, (ii) a portion of the GAA polypeptide, (e.g., any portion of residues 28-56 of SEQ ID NO: 1) (iii) a heterologous signal peptide as disclosed herein, and (iv) a GAA polypeptide, e.g., a N-terminal truncated GAA polypeptide, e.g., a GAA polypeptide beginning at any of residues 35, 40, 50, 57, 60, 68, 69, 70, 72, 74, 779, 790, 791, 792, 793 and 796 of SEQ ID NO: 1. In some embodiments, the GAA polypeptide can comprise a C-terminal truncation of at least 1, or at least 2, or at least 3, or at least 4, or at least 5, or at least between 5-10, or between 10-20, or between 20-30 amino residues at the C-terminus of the GAA polypeptide. Exemplary heterologous signal peptides are disclosed herein, including, but not limited to, signal peptides comprising amino acids selected from any of SEQ ID NO: 60-78. In some embodiments, the signal peptide attached to the N-terminal of SEQ ID NOs: 60, 61, 62, 63 and 64.

### A. Alpha-Glucosidase (GAA) Polypeptide

[0131] The GAA gene (NM_000152.3) is approximately 18.3 kilobases (kb) long and contains 20 exons (Dasouki et al. 2014). Its complementary DNA has 2,859 nucleotides of coding sequence which encode the immature 952 amino acid enzyme. GAA is synthesized as a membrane bound, catalytically inactive (with respect to the natural substrate glycogen) precursor which is sequestered in the endoplasmic reticulum. It undergoes sugar chain modification in the Golgi complex, followed by transport into the (minor) secretory pathway, or into lysosomes where it is trimmed in a stepwise process at both the amino- and carboxyl-termini. Phosphorylation of mannose residues ensures efficient transport of the enzyme to the lysosomes via the mannose 6-phosphate receptor. In the lysosomes, GAA catalyzes the hydrolysis of α1→4 glucosidic linkages in glycogen in the low potential hydrogen (pH) environment to glucose. Specificity for the natural substrate (glycogen) is gained during its maturation.

[0132] Many normal allelic variants exist in GAA and are responsible for the three known alloenzymes (GAA1, GAA2, and GAA4). More than 450 mutations in GAA have been reported in individuals with Pompe disease. Nonsense mutations, large and small gene rearrangements, and splicing defects have been observed with many mutations being potentially specific to families, geographic regions, or ethnicities. Combinations of mutations that result in either complete or nearly complete absence of GAA enzyme activity (typically <1% of normal activity in skin fibroblasts) are seen more commonly in individuals with IOPD, whereas those combinations that allow partial enzyme activity (approximately 2-40% of normal activity in skin fibroblasts) typically have LOPD presentation. GAA mutations result in messenger RNA instability and/or severely truncated acid α-glucosidase or an enzyme with markedly decreased activity. Dysfunction or absence of GAA leads to the accumulation of glycogen in lysosomes and in the cytoplasm in multiple tissues, resulting in the destruction of skeletal, smooth and cardiac muscle. The effect of the enzyme deficiency may extend to vesicle systems that are linked to lysosomes and may also affect receptors, such as glucose transporter 4, that cycle through these organelles. Evidence has also shown a failure of productive autophagy and the progressive accumulation of autophagosomes that disrupt the contractile apparatus in muscle fibers, which correlated with a lack of correction of skeletal muscle during ERT.

[0133] Alpha-glucosidase (GAA) polypeptide is a member of family 31 of glycoside hydrolyases. Human GAA is synthesized as a 110 kDal precursor (Wisselaar et al. (1993) J. Biol. Chem. 268(3): 2223-31). The mature form of the enzyme is a mixture of monomers of 70 and 76 kDal (Wisselaar et al. (1993) J. Biol. Chem. 268(3): 2223-31). The precursor enzyme has seven potential glycosylation sites and four of these are retained in the mature enzyme (Wisselaar et al. (1993) J. Biol. Chem. 268(3): 2223-31). The proteolytic cleavage events which produce the mature enzyme occur in late endosomes or in the lysosome (Wisselaar et al. (1993) J. Biol. Chem. 268(3): 2223-31).

[0134] The rAAV vector genome can encode a GAA polypeptide can include, for example, amino acid residues 40-952 of human GAA, or a smaller portion, such as amino acid residues 40-790.

[0135] The C-terminal 160 amino acids are absent from the mature 70 and 76 kDal GAA polypeptide species. However, certain Pompe alleles resulting in the complete loss of GAA activity map to this region, for example Val949Asp (Becker et al. (1998) J. Hum. Genet. 62:991). The phenotype of this mutant indicates that the C-terminal portion of the protein, although not part of the 70 or 76 kDal species, plays an important role in the function of the protein. It has also been reported that the C-terminal portion of the protein, although cleaved from the rest of the protein during processing, remains associated with the major species (Moreland et al. (Nov. 1, 2004) J. Biol. Chem., Manuscript 404008200). Accordingly, the C-terminal residues could play a direct role in the catalytic activity of the protein, and/or may be involved in promoting proper folding of the N-terminal portions of the protein.

[0136] The native GAA gene encodes a precursor polypeptide which possesses a signal sequence and an adjacent putative trans-membrane domain, a trefoil domain (PFAM PF00088) which is a cysteine-rich domain of about 45 amino acids containing 3 disulfide linkages (Thim (1989) FEBS Lett. 250:85), the domain defined by the mature 70/76 kDal polypeptide, and the C-terminal domain. It has been reported that both the trefoil domain and the C-terminal domain are required for the production of functional GAA, and that it is possible that the C-terminal domain interacts with the trefoil domain during protein folding perhaps facilitating appropriate disulfide bond formation in the trefoil domain.

[0137] In some embodiments of the methods and compositions as disclosed herein, the human GAA protein expressed by the AAV comprises amino acids of SEQ ID NO: 1, or a protein at least 60%, or 70%, or 80%, 85% or 90% or 95%, or 98%, or 99% identical to SEQ ID NO: 1.

[0138] In some embodiments, the hGAA polypeptide comprises a signal peptide (SP). One of ordinary skill in the art can appreciate particular positions of GAA to which a signal peptide (SP) can be fused.

[0139] In some embodiments of the methods and compositions as disclosed herein, the human GAA protein expressed by the AAV comprises amino acids of SEQ ID NO: 1, or fragments or variants thereof, for example a human GAA protein beginning at any of residues selected from: 40, 50, 57, 68, 69, 70, 71, 72, 779, 787, 789, 790, 791, 792, 793, or 796 of SEQ ID NO: 1. Accordingly, in one aspect the invention relates to a GAA protein, where the SP is fused to N-terminal amino acid 40, 50, 57, 68, 69, 70, 71, 72, 779, 787, 789, 790, 791, 792, 793, or 796 of human GAA of SEQ ID NO: 1. In some embodiments, the GAA polypeptide expressed by the AAV vector disclosed herein has at least 80%, or at least 85%, or at least 90% or at least 95% sequence identity to amino acid residues selected from: 28-952, 35-952, 40-952, 50-952, 57-952, 60-952, 68-952, 69-952, 70-952, 72-952, 74-952, 779-952, 790-952, 791-952, 792-952, 793-952 and 796-952 of SEQ ID NO: 1, and can further comprise a N-terminal signal peptide, where the signal peptide can be an endogenous GAA signal peptide, or a heterologous signal peptide as disclosed herein.

[0140] In some embodiments of the methods and compositions as disclosed herein, the human GAA protein expressed by the AAV comprises amino acids is a human GAA protein beginning at any of residues selected from: 40, 50, 57, 68, 69, 70, 71, 72, 779, 787, 789, 790, 791, 792, 793, or 796 of SEQ ID NO: 1, or a protein at least 60%, or 70%, or 80%, 85% or 90% or 95%, or 98%, or 99% identical thereto.

(i) Modified GAA (modGAA) Polypeptides

[0141] In some embodiments, the modified human GAA protein comprises a polypeptide with at least one modification selected from: H199R, R223H, V780I or H201L of SEQ ID NO: 1, or a variant of at least 80%, 90%, 95%, or 99% homology to at least 500, 550, 600, 650, 700, 750, 800, 850, or 900 amino acids of SEQ ID NO: 1 having at least one of these modification. In some embodiments, the modified human GAA protein comprises a polypeptide comprises at least two modifications selected from: H199R, R223H, V780I or H201L of SEQ ID NO: 1, or a variant of at least 80%, 90%, 95%, or 99% homology to at least 500, 550, 600, 650, 700, 750, 800, 850, or 900 consecutive amino acids of SEQ ID NO: 1 having at least two of these modifications. In some embodiments, the modified human GAA protein comprises a polypeptide with three modifications selected from: H199R, R223H, V780I and H201L of SEQ ID NO: 1 (GAA-H199R-H201L-R223H or GAA-H199R-H201L-V780I), or a variant of at least 80%, 90%, 95%, or 99% homology to at least 500, 550, 600, 650, 700, 750, 800, 850, or 900 concecutive amino acids of SEQ ID NO: 1 having these three modifications.

[0142] One can use these modified GAA polypeptides and fragments thereof. In some embodiments, the human modified GAA protein expressed by the AAV comprises a GAA polypeptide of SEQ ID NO: 1 as modified above, or a protein at least 60%, or 70%, or 80%, 85% or 90% or 95%, or 98%, or 99% identical to SEQ ID NO: 1, or a nucleic acid encoding such a sequence (SEQ ID NO: 3), or a fragment of SEQ ID NO: 1, wherein the fragment begins at any of residues selected from: 40, 50, 57, 68, 69, 70, 71, 72, 779, 787, 789, 790, 791, 792, 793, or 796 of any of SEQ ID NO: 1 (modGAA; H199R, R223H, V780I) or a protein at least 60%, or 70%, or 80%, 85% or 90% or 95%, or 98%, or 99% identical to SEQ ID NO: 1, where there is R at amino acid position 199; a H at amino acid position 223; and I at amino acid position 780. Actus 101 (SEQ ID NO: 1), while comprising three point mutations, is considered a wildtype GAA.

[0143] In some embodiments, GAA is modified to add or remove glycosylation sites such as N-linked glycosylation sites, O-linked glycosylation sites or both. In certain embodiments, the addition or removal of glycosylation sites are achieved by N-terminal deletions, C-terminal deletions, internal deletions, random point mutagenesis, or, site directed mutagenesis. In some embodiments, the exemplary GAA modification involve addition of one or more Asparagine (Asn) residue/s or, one or more mutation to yield Asparagine (Asn) residue/s or, deletion of one or more Asparagine (Asn) residue/s. In certain embodiments, all or some of the N-linked, and/or, O-linked glycosylation sites present in GAA are mutated. In some embodiments, GAA modifications will yield information pertaining to the biological activity, physical structure and/or substrate binding potential of GAA.

[0144] In one embodiment, the modified human GAA protein comprises a deletion of the stretch of amino acids between and inclusive of 29-56 of SEQ ID NO: 1. In one embodiment, a modified human GAA protein comprising a deletion of the stretch of amino acids between and inclusive of 29-56 of SEQ ID NO: 1 is no longer maintained within the cell.

[0145] In one embodiment, the modified human GAA protein comprises a polypeptide with at least one modification selected from Table 12. Modifications listed on Table 12 are commonly identified GAA polymorphisms but are not associated with a disease, e.g., Pompe disease.

TABLE 12
Common GAA polymorphisms.

| Position(S) | Amino Acid No | Mutation |
|---|---|---|
| CA401359830 | 2 | G > E |
| CA294886445 | 3 | V > A |
| CA401359856 | 4 | R > S |
| CA401359866 | 5 | H > P |
| CA401359886 | 6 | P > Q |
| CA401359883 | 6 | P > S |
| CA401359899 | 7 | P > T |
| CA8814758 | 8 | C > Y |
| CA401359938 | 9 | S > C |
| CA10604542 | 9 | S > P |
| CA401359943 | 10 | H > Y |
| CA8814761 | 11 | R > L |
| CA8814763 | 12 | L > F |
| CA8814764 | 12 | L > P |
| CA401360004 | 14 | A > V |
| CA8814770 | 16 | C > S |
| CA401360048 | 17 | A > S |
| CA8814773 | 17 | A > V |
| CA401360057 | 18 | L > F |
| CA401360075 | 19 | V > L |
| CA8814774 | 19 | V > M |
| CA8814775 | 20 | S > F |
| CA401360089 | 20 | S > T |
| CA401360111 | 22 | A > T |
| CA8814776 | 22 | A > V |
| CA8814777 | 23 | T > A |
| CA294886529 | 24 | A > V |
| CA8814782 | 25 | A > V |
| CA8814784 | 27 | L > V |
| CA401360200 | 28 | G > E |
| CA294886548 | 28 | G > R |
| CA10604460 | 28 | G > V |
| CA294886572 | 29 | H > Y |
| CA401360231 | 31 | L > V |
| CA8814786 | 33 | H > R |
| CA8814788 | 34 | D > Y |
| CA401360282 | 39 | P > L |
| CA8814790 | 39 | P > S |
| CA401360310 | 44 | G > D |
| CA401360312 | 45 | S > A |
| CA401360316 | 45 | S > C |
| CA401360317 | 45 | S > F |
| CA401360314 | 45 | S > P |
| CA401360321 | 46 | S > F |
| CA294886602 | 47 | P > S |
| CA294886615 | 51 | E > G |
| CA8814796 | 53 | H > N |
| CA8814797 | 53 | H > R |
| CA8814799 | 54 | P > L |
| CA8814798 | 54 | P > T |
| CA294886644 | 56 | H > L |
| CA294886642 | 56 | H > N |
| CA8814800 | 56 | H > Y |
| CA294886669 | 58 | Q > H |
| CA8814803 | 59 | G > E |
| CA8814802 | 59 | G > R |
| CA401360401 | 60 | A > D |
| CA401360398 | 60 | A > T |
| CA401360410 | 61 | S > R |
| CA401360414 | 62 | R > K |
| CA401360423 | 63 | P > L |
| CA294886682 | 64 | G > E |
| CA401360435 | 65 | P > L |
| CA401360432 | 65 | P > S |
| CA8814806 | 69 | Q > * |
| CA8814807 | 69 | Q > R |
| CA8814808 | 70 | A > E |
| CA401360459 | 70 | A > P |
| CA8814810 | 71 | H > Q |
| CA294886764 | 72 | P > T |
| CA8814813 | 73 | G > S |
| CA401360481 | 74 | R > C |
| CA8814815 | 74 | R > P |
| CA8814817 | 77 | A > P |
| CA401360499 | 77 | A > V |
| CA8814819 | 79 | P > S |
| CA401360524 | 81 | Q > H |
| CA401360526 | 82 | C > R |
| CA8814823 | 83 | D > V |
| CA401360542 | 84 | V > G |
| CA401360539 | 84 | V > L |
| CA294886928 | 86 | P > H |
| CA8814830 | 87 | N > H |
| CA8814831 | 87 | N > T |
| CA401360560 | 88 | S > G |
| CA401360566 | 88 | S > R |
| CA8814834 | 90 | F > L |
| VAR_004285 | 91 | D > N |
| CA241285 | 91 | D > S |
| CA8814836 | 91 | D > Y |
| CA401360596 | 93 | A > V |
| CA401360598 | 94 | P > S |
| CA401360604 | 95 | D > N |
| CA401360622 | 97 | A > V |
| CA401360637 | 99 | T > I |
| CA8814843 | 100 | Q > E |
| CA401360641 | 100 | Q > K |
| CA401360648 | 100 | Q > R |
| CA401360674 | 102 | Q > * |
| CA401360696 | 103 | C > W |
| CA8814847 | 105 | A > D |
| CA8814848 | 105 | A > V |
| CA401360722 | 106 | R > S |
| CA294887102 | 107 | G > C |
| CA401360737 | 107 | G > D |
| CA401360749 | 108 | C > * |
| CA401360751 | 108 | C > W |
| CA294887113 | 109 | C > R |
| CA8814851 | 110 | Y > H |
| CA401360782 | 111 | I > F |
| CA401360786 | 111 | I > M |
| CA401360791 | 112 | P > A |
| CA8814852 | 114 | K > R |
| CA8814853 | 116 | G > V |
| CA401360860 | 118 | Q > P |
| CA8814856 | 121 | Q > * |
| CA401360891 | 121 | Q > P |
| CA8814858 | 122 | M > R |
| CA401360915 | 123 | G > R |
| CA401360930 | 124 | Q > E |
| CA401360928 | 124 | Q > K |
| CA401360953 | 126 | W > R |
| CA401360983 | 128 | F > V |
| CA8814862 | 130 | P > L |
| CA8814861 | 130 | P > S |
| CA401361020 | 131 | P > S |
| CA401361016 | 131 | P > T |
| CA401361042 | 133 | Y > N |
| CA8814865 | 134 | P > S |
| CA8814866 | 135 | S > R |
| CA294887228 | 139 | E > K |
| CA8814871 | 142 | S > R |
| CA401361288 | 143 | S > C |
| CA401361271 | 143 | S > P |
| CA401361370 | 146 | M > I |
| CA294887253 | 150 | A > G |
| CA294887248 | 150 | A > T |
| CA401361468 | 151 | T > A |
| CA401361469 | 151 | T > S |
| CA8814876 | 154 | R > C |
| CA8814877 | 154 | R > H |
| CA401361552 | 156 | T > P |
| CA401361565 | 156 | T > S |
| CA401361581 | 157 | P > S |
| CA401361593 | 158 | T > P |
| CA401361619 | 159 | F > L |
| CA294887341 | 161 | P > H |
| CA401361638 | 162 | K > R |
| CA8814880 | 163 | D > V |
| CA401361651 | 164 | I > F |
| CA8814883 | 168 | R > L |
| CA401361673 | 168 | R > P |
| CA8814882 | 168 | R > W |
| CA294887359 | 170 | D > G |
| CA401361709 | 171 | V > L |
| CA401361738 | 172 | M > I |
| CA401361729 | 172 | M > K |
| CA401361724 | 172 | M > V |
| CA401361746 | 173 | M > L |
| CA401361748 | 173 | M > V |
| CA8814886 | 174 | E > D |
| CA294887367 | 176 | E > K |
| CA294887368 | 177 | N > T |
| CA8814892 | 181 | F > L |
| CA8814894 | 182 | T > M |
| CA8814927 | 183 | I > M |
| CA401362038 | 184 | K > R |
| CA8814928 | 187 | A > G |
| CA294888081 | 188 | N > D |
| CA401362102 | 189 | R > K |
| CA8814929 | 190 | R > C |
| CA8814930 | 190 | R > L |
| CA294888098 | 191 | Y > H |
| CA8814931 | 191 | Y > N |
| CA401362134 | 192 | E > K |
| CA401362165 | 194 | P > L |
| CA401362170 | 195 | L > V |
| CA401362184 | 196 | E > Q |
| CA8814936 | 197 | T > N |
| CA8814937 | 198 | P > L |
| CA401362214 | 198 | P > R |
| CA294888175 | 198 | P > T |
| VAR_004286 | 199 | H > R |
| CA8814938 | 200 | V > D |
| CA401362236 | 200 | V > F |
| CA401362251 | 201 | H > Y |
| CA8814941 | 203 | R > Q |
| CA8814942 | 204 | A > T |
| CA401362293 | 205 | P > A |
| CA8814944 | 206 | S > C |
| CA401362303 | 206 | S > P |
| RCV001175569 | 208 | L > P |
| CA294888258 | 209 | Y > H |
| CA8814952 | 215 | E > K |
| CA401362453 | 218 | F > L |
| CA8814953 | 218 | F > S |
| CA401362473 | 220 | V > E |
| CA401362477 | 220 | V > G |
| CA401362502 | 222 | V > G |
| VAR_004287 | 223 | R > H |
| CA401362510 | 223 | R > P |
| CA401362504 | 223 | R > S |
| CA8814959 | 226 | L > P |
| CA198772 | 226 | L > V |
| CA401362586 | 228 | G > D |
| CA8814963 | 229 | R > H |
| CA401362611 | 230 | V > L |
| CA401362640 | 231 | L > P |
| CA8814993 | 234 | T > A |
| CA8814994 | 234 | T > M |
| CA8814996 | 235 | T > A |
| CA401363061 | 237 | A > E |
| CA401363074 | 238 | P > S |
| CA401363168 | 243 | D > N |
| CA401363204 | 244 | Q > H |
| CA294889597 | 245 | F > V |
| CA8815005 | 246 | L > F |
| CA401363297 | 250 | T > I |
| CA401363390 | 255 | Q > H |
| CA401363379 | 255 | Q > R |
| CA8815011 | 256 | Y > C |
| CA401363423 | 258 | T > I |
| CA401363464 | 262 | E > A |
| CA8815018 | 263 | H > R |
| CA294889693 | 264 | L > F |
| CA8815020 | 265 | S > R |
| CA401363512 | 268 | M > I |
| CA401363510 | 268 | M > I |
| CA401363521 | 270 | S > G |
| CA401363525 | 270 | S > N |
| CA401363558 | 272 | S > R |
| CA8815021 | 273 | W > * |
| CA8815022 | 274 | T > I |
| CA401363599 | 276 | I > F |
| RCV001090258 | 276 | I > V |
| CA401363615 | 277 | T > I |
| CA401363644 | 279 | W > C |
| CA8815026 | 281 | R > Q |
| CA401363673 | 282 | D > N |
| CA8815027 | 284 | A > T |
| CA8815030 | 285 | P > L |
| CA8815032 | 286 | T > M |
| CA401363807 | 287 | P > L |
| CA8815071 | 287 | P > S |
| CA401363883 | 293 | G > V |
| CA8815081 | 295 | H > N |
| CA401363965 | 300 | A > E |
| CA294889969 | 300 | A > V |
| CA8815087 | 305 | G > R |
| CA401364038 | 306 | S > A |
| VAR_068586 | 310 | V > G |
| CA294891320 | 310 | V > L |
| CA401364194 | 311 | F > L |
| CA8815093 | 312 | L > M |
| CA294891343 | 315 | S > N |
| CA401364267 | 317 | A > V |
| CA10606846 | 318 | M > L |
| CA294891694 | 320 | V > M |
| CA401364384 | 321 | V > A |
| CA294891725 | 321 | V > I |
| CA8815118 | 324 | P > Q |
| CA8815120 | 324 | P > R |
| CA294891758 | 325 | S > N |
| CA401364455 | 327 | A > G |
| CA8815125 | 332 | S > L |
| CA10604927 | 334 | G > C |
| CA294891791 | 336 | I > M |
| CA8815127 | 336 | I > N |
| CA294891797 | 338 | D > G |
| CA401364575 | 338 | D > Y |
| CA8815129 | 340 | Y > C |
| CA8815130 | 341 | I > V |
| CA401364670 | 346 | E > Q |
| CA401364694 | 347 | P > H |
| CA8815131 | 348 | K > R |
| CA401364711 | 349 | S > R |
| CA294891876 | 352 | Q > * |
| CA401364773 | 353 | Q > H |
| CA8815135 | 353 | Q > R |
| CA401364783 | 354 | Y > S |
| CA198782 | 357 | V > F |
| CA8815138 | 357 | V > I |
| CA401364892 | 360 | Y > S |
| CA294892083 | 361 | P > S |
| CA8815165 | 363 | M > R |
| RCV001194238 | 363 | M > V |
| CA8815166 | 364 | P > L |
| CA401364935 | 364 | P > S |
| CA8815168 | 365 | P > S |
| CA8815169 | 366 | Y > H |
| CA294892167 | 368 | G > C |
| CA8815170 | 368 | G > S |
| CA8815171 | 368 | G > V |
| CA401364969 | 370 | G > D |
| CA401364981 | 372 | H > D |
| CA401364985 | 372 | H > Q |
| CA401364995 | 374 | C > Y |
| CA401365013 | 377 | G > C |
| CA294892229 | 378 | Y > C |
| CA294892234 | 379 | S > F |
| CA294892232 | 379 | S > Y |
| CA401365044 | 382 | A > G |
| CA401365057 | 384 | T > I |
| CA401365055 | 384 | T > N |
| CA8815184 | 385 | R > H |
| CA401365065 | 386 | Q > R |
| CA401365070 | 387 | V > M |
| CA401365075 | 388 | V > L |
| CA8815187 | 388 | V > M |
| CA8815188 | 389 | E > K |
| CA8815191 | 391 | M > T |
| VAR_068593 | 391 | M > V |
| CA294892303 | 394 | A > T |
| CA8815193 | 395 | H > L |
| CA8815195 | 396 | F > L |
| CA8815194 | 396 | F > V |
| CA8815196 | 397 | P > R |
| CA8815198 | 398 | L > M |
| CA401365163 | 400 | V > A |
| CA401365192 | 404 | D > G |
| CA10604928 | 404 | D > V |
| CA8815235 | 407 | Y > C |
| CA234047 | 407 | Y > H |
| CA8815237 | 408 | M > L |
| CA401365214 | 408 | M > L |
| CA8815241 | 411 | R > Q |
| CA401365237 | 412 | R > G |
| CA294892536 | 412 | R > K |
| CA401365241 | 412 | R > S |
| CA294892544 | 415 | T > M |
| CA401365278 | 417 | N > K |
| CA401365292 | 419 | D > G |
| CA401365297 | 420 | G > D |
| CA294892550 | 420 | G > S |
| CA401365310 | 422 | R > L |
| CA8815245 | 422 | R > Q |
| CA401365311 | 423 | D > N |
| CA8815247 | 425 | P > Q |
| CA401365327 | 425 | P > T |
| CA401365338 | 427 | M > V |
| CA401365382 | 433 | Q > L |
| CA8815254 | 435 | G > S |
| CA401365395 | 435 | G > V |
| CA8815256 | 436 | R > Q |
| CA294892655 | 438 | Y > S |
| CA294892670 | 439 | M > I |
| CA294892660 | 439 | M > V |
| CA8815259 | 440 | M > T |
| CA8815287 | 444 | P > S |
| CA8815289 | 446 | I > L |
| CA8815292 | 449 | S > L |
| CA401366333 | 451 | P > S |
| CA8815295 | 452 | A > S |
| CA401366343 | 452 | A > T |
| CA401366358 | 453 | G > W |
| VAR_068597 | 458 | Y > C |
| CA8815299 | 459 | D > E |
| CA294894004 | 460 | E > D |
| CA401366468 | 461 | G > D |
| CA401366459 | 461 | G > S |
| CA8815302 | 464 | R > K |
| CA401366495 | 464 | R > S |
| CA401366490 | 464 | R > T |
| CA401366504 | 465 | G > E |
| CA401366496 | 465 | G > R |
| CA401366499 | 465 | G > W |
| CA8815305 | 466 | V > D |
| CA401366513 | 466 | V > G |
| CA8815304 | 466 | V > I |
| CA401366562 | 470 | N > S |
| CA8815311 | 471 | E > K |
| CA401366585 | 472 | T > P |
| CA401366591 | 472 | T > S |
| CA401366597 | 473 | G > C |
| CA401366599 | 473 | G > D |
| CA294894092 | 473 | G > R |
| CA294894100 | 474 | Q > L |
| CA8815314 | 475 | P > L |
| CA401366647 | 477 | I > M |
| CA294894127 | 478 | G > V |
| CA401366662 | 479 | K > E |
| CA401366767 | 480 | V > A |
| CA401366766 | 480 | V > E |
| CA8815347 | 480 | V > I |
| CA401366761 | 480 | V > L |
| CA401366772 | 481 | W > R |
| CA401366810 | 484 | S > A |
| CA401366817 | 484 | S > C |
| CA401366822 | 485 | T > A |
| CA401366836 | 486 | A > S |
| CA8815351 | 488 | P > A |
| CA401366926 | 493 | P > S |
| CA401366956 | 495 | A > V |
| CA198789 | 499 | W > R |
| CA401367013 | 500 | E > K |
| CA401367049 | 502 | M > R |
| CA401367077 | 505 | E > A |
| CA401367089 | 506 | F > L |
| CA401367111 | 509 | Q > L |
| CA294894901 | 510 | V > G |
| CA294894906 | 511 | P > L |
| CA401367148 | 515 | M > T |
| CA8815364 | 517 | I > V |
| CA401367191 | 519 | M > I |
| CA401367186 | 519 | M > V |
| CA401367197 | 520 | N > S |
| CA401367224 | 524 | N > K |
| CA401367222 | 524 | N > S |
| CA239454 | 528 | G > A |
| CA401367268 | 531 | D > N |
| CA294895023 | 532 | G > C |
| CA294895032 | 534 | P > L |
| CA401367292 | 534 | P > R |
| CA401367299 | 535 | N > K |
| CA401367297 | 535 | N > S |
| CA401367352 | 542 | P > L |
| CA8815393 | 542 | P > S |
| CA401367345 | 542 | P > T |
| CA401367360 | 543 | Y > C |
| CA915952253 | 544 | V > M |
| CA10606111 | 546 | G > V |
| CA8815423 | 547 | V > M |
| CA401368749 | 548 | V > A |
| CA8815424 | 548 | V > G |
| CA8815426 | 549 | G > W |
| CA294895748 | 550 | G > W |
| CA8815428 | 552 | L > I |
| CA401368824 | 553 | Q > K |
| CA8815430 | 553 | Q > R |
| CA401368854 | 554 | A > P |
| CA401368920 | 557 | I > S |
| CA401368917 | 557 | I > T |
| CA8815434 | 560 | S > F |
| CA401368990 | 562 | H > Q |
| CA401368994 | 563 | Q > R |
| CA294895795 | 567 | T > P |
| CA8815436 | 569 | Y > H |
| CA401369039 | 570 | N > Y |
| CA10604317 | 571 | L > P |
| CA401369052 | 572 | H > P |
| CA8815438 | 572 | H > Q |
| CA401369065 | 573 | N > K |
| CA401369071 | 574 | L > F |
| CA401369090 | 575 | Y > F |
| VAR_004300 | 576 | G > S |
| CA401369106 | 577 | L > P |
| CA401369103 | 577 | L > V |
| CA294895849 | 579 | E > Q |
| CA294895855 | 580 | A > V |
| CA8815443 | 581 | I > L |
| CA8815444 | 581 | I > M |
| CA294895864 | 582 | A > P |
| CA8815447 | 584 | H > D |
| CA401369180 | 584 | H > P |
| CA401369182 | 584 | H > R |
| VAR_068611 | 585 | R > K |
| CA294896266 | 586 | A > S |
| CA8815471 | 588 | V > M |
| CA8815474 | 592 | G > E |
| CA401369334 | 592 | G > R |
| CA8815475 | 593 | T > I |
| CA401369359 | 594 | R > C |
| CA401369395 | 597 | V > A |
| CA294896305 | 598 | I > V |
| CA401369410 | 599 | S > P |
| CA401369427 | 600 | R > P |
| CA401369447 | 602 | T > N |
| CA8815485 | 602 | T > S |
| CA401369491 | 606 | H > P |
| CA294896378 | 606 | H > Q |
| CA401369512 | 608 | R > G |
| CA294896401 | 608 | R > L |
| CA401369519 | 608 | R > P |
| CA401369524 | 609 | Y > D |
| CA8815490 | 609 | Y > H |
| CA401369553 | 611 | G > S |
| CA401369560 | 612 | H > P |
| CA8815494 | 612 | H > R |
| CA401369582 | 613 | W > C |
| CA401369573 | 613 | W > R |
| CA401369617 | 616 | D > E |
| CA294896447 | 616 | D > N |
| CA401369624 | 617 | V > A |
| CA294896458 | 617 | V > L |
| CA401369636 | 618 | W > G |
| CA401369676 | 621 | W > R |
| CA401369689 | 622 | E > K |
| CA401369691 | 622 | E > Q |
| CA8815502 | 624 | L > F |
| CA401369722 | 624 | L > V |
| CA8815504 | 625 | A > T |
| CA294896504 | 627 | S > F |
| CA8815506 | 628 | V > L |
| VAR_068621 | 629 | P > L |
| CA294896534 | 629 | P > S |
| CA294896808 | 630 | E > A |
| CA401369839 | 633 | Q > E |
| CA401369857 | 635 | N > S |
| CA401369862 | 636 | L > V |
| CA8815544 | 637 | L > M |
| CA401369872 | 638 | G > E |
| CA401369870 | 638 | G > R |
| CA401369877 | 639 | V > L |
| CA401369894 | 642 | V > I |
| CA294896832 | 643 | G > W |
| CA10605478 | 644 | A > P |
| CA8815550 | 644 | A > V |
| CA8815553 | 646 | V > I |
| CA401369920 | 647 | C > F |
| CA401369926 | 648 | G > V |
| CA294896886 | 651 | G > D |
| CA401369943 | 651 | G > V |
| CA8815556 | 653 | T > A |
| CA8815557 | 653 | T > N |
| CA401370002 | 661 | W > R |
| CA401370022 | 663 | Q > H |
| CA401370023 | 663 | Q > H |
| CA401370024 | 664 | L > V |
| CA401370036 | 666 | A > P |
| CA294896940 | 666 | A > V |
| CA401370051 | 668 | Y > C |
| CA401370050 | 668 | Y > S |
| CA401370056 | 669 | P > A |
| CA8815563 | 669 | P > R |
| CA401370055 | 669 | P > S |
| CA8815562 | 669 | P > T |
| CA401370068 | 671 | M > L |
| CA220392 | 671 | M > R |
| CA8815565 | 671 | M > T |
| CA8815564 | 671 | M > V |
| CA401370079 | 673 | N > T |
| CA401370094 | 674 | H > Y |
| CA401370115 | 675 | N > D |
| CA401370120 | 675 | N > S |
| CA8815567 | 675 | N > T |
| CA401370175 | 679 | S > R |
| CA401370294 | 682 | Q > K |
| CA401370340 | 684 | P > R |
| CA915952255 | 686 | S > K |
| CA401370371 | 686 | S > N |
| CA401370406 | 688 | S > N |
| CA8815603 | 688 | S > R |
| CA8815604 | 688 | S > R |
| CA8815605 | 689 | E > G |
| VAR_004309 | 689 | E > K |
| CA401370419 | 689 | E > Q |
| CA401370430 | 690 | P > R |
| CA401370433 | 691 | A > S |
| CA8815608 | 693 | Q > R |
| CA294897317 | 698 | A > D |
| CA401370485 | 698 | A > V |
| CA401370488 | 699 | L > F |
| CA401370489 | 699 | L > P |
| CA294897331 | 700 | T > A |
| CA294897382 | 703 | Y > C |
| CA401370512 | 704 | A > S |
| CA401370525 | 706 | L > F |
| CA401370528 | 706 | L > P |
| CA294897393 | 707 | P > L |
| CA8815618 | 708 | H > L |
| CA8815615 | 708 | H > N |
| CA401370556 | 711 | T > I |
| CA401370559 | 712 | L > Q |
| CA8815622 | 713 | F > L |
| CA294897442 | 714 | H > R |
| CA401370585 | 716 | A > P |
| CA401370586 | 716 | A > S |
| CA8815630 | 719 | A > V |
| CA8815631 | 720 | G > E |
| CA401370625 | 723 | V > G |
| CA8815635 | 723 | V > M |
| CA401370630 | 724 | A > D |
| CA401370627 | 724 | A > T |
| CA401370639 | 726 | P > L |
| CA401370648 | 728 | F > I |
| CA401370659 | 729 | L > P |
| CA401324684 | 732 | P > S |
| CA8815654 | 732 | P > T |
| CA8815655 | 733 | K > R |
| CA401324707 | 735 | S > F |
| CA401324703 | 735 | S > T |
| CA401324719 | 737 | T > I |
| CA294856435 | 740 | V > L |
| CA10607034 | 741 | D > V |
| CA401324761 | 744 | L > P |
| CA401324773 | 747 | G > E |
| CA8815667 | 747 | G > R |
| CA294856500 | 747 | G > W |
| CA401324808 | 753 | T > A |
| CA294856528 | 753 | T > I |
| CA8815670 | 753 | T > N |
| CA401324824 | 756 | L > F |
| CA8815672 | 757 | Q > P |
| CA401324830 | 757 | Q > R |
| CA8815675 | 761 | A > G |
| CA401324880 | 765 | G > D |
| CA294856634 | 766 | Y > N |
| CA8815680 | 766 | Y > S |
| CA294856691 | 771 | T > I |
| CA294856710 | 774 | D > E |
| CA401324934 | 774 | D > H |
| CA8815713 | 778 | V > L |
| CA401324975 | 779 | P > Q |
| VAR_004313 | 780 | V > I |
| CA401324977 | 780 | V > L |
| CA8815715 | 780 | V > L |
| CA294857110 | 781 | E > K |
| CA294857130 | 782 | A > V |
| CA8815716 | 783 | L > F |
| CA401325035 | 789 | P > L |
| CA294857155 | 789 | P > Q |
| CA8815719 | 789 | P > R |
| CA294857158 | 790 | P > S |
| CA8815720 | 791 | A > S |
| CA8815721 | 791 | A > V |
| CA294857164 | 794 | R > C |
| CA234052 | 794 | R > G |
| CA10606072 | 795 | E > K |
| CA8815725 | 798 | I > V |
| CA401325138 | 806 | T > A |
| CA8815733 | 806 | T > P |
| CA401325151 | 807 | L > P |
| CA401325165 | 809 | A > P |
| CA8815740 | 810 | P > L |
| CA8815739 | 810 | P > S |
| CA401325221 | 814 | I > T |
| CA401325227 | 815 | N > D |
| VAR_004314 | 816 | V > I |
| CA401325283 | 817 | H > R |
| CA8815749 | 823 | I > L |
| CA401325517 | 823 | I > V |
| CA10604584 | 825 | P > R |
| RCV001091539 | 827 | Q > * |
| CA401325545 | 827 | Q > R |
| CA294857876 | 828 | G > S |
| CA8815773 | 829 | P > L |
| CA401325955 | 830 | G > R |
| CA401325967 | 831 | L > F |
| CA8815775 | 833 | T > I |
| CA401325992 | 834 | T > A |
| CA294857899 | 836 | S > P |
| CA401326041 | 839 | Q > * |
| CA294857971 | 840 | P > A |
| CA401326065 | 841 | M > I |
| CA294857973 | 841 | M > T |
| CA8815780 | 844 | A > D |
| CA401326085 | 844 | A > T |
| CA401326104 | 846 | A > T |
| CA401326131 | 848 | T > I |
| CA8815784 | 851 | G > A |
| CA8815786 | 851 | G > E |
| CA8815785 | 851 | G > V |
| CA8815788 | 854 | R > Q |
| CA401326195 | 855 | G > R |
| CA401326193 | 855 | G > R |
| CA401326213 | 857 | L > M |
| CA294858045 | 864 | S > N |
| CA401326319 | 866 | E > A |
| CA401326321 | 866 | E > D |
| CA401326364 | 871 | G > E |
| CA401326408 | 875 | Q > R |
| CA401326462 | 879 | L > P |
| CA8815798 | 879 | L > V |
| CA294858091 | 880 | A > S |
| CA294858106 | 880 | A > V |
| CA8815799 | 881 | R > G |
| CA401326485 | 881 | R > S |
| CA8815825 | 884 | T > M |
| CA8815828 | 886 | V > M |
| CA8815832 | 891 | R > C |
| CA8815833 | 891 | R > H |
| CA401326709 | 892 | V > L |
| CA8815834 | 892 | V > M |
| CA8815835 | 897 | A > G |
| CA401326806 | 897 | A > T |
| CA401326843 | 898 | G > D |
| CA8815836 | 901 | L > M |
| CA401326934 | 903 | K > E |
| CA401326957 | 904 | V > M |
| CA401326986 | 906 | V > G |
| RCV001091541 | 906 | V > I |
| CA401326996 | 907 | L > P |
| CA8815841 | 912 | A > V |
| CA401327122 | 914 | Q > P |
| CA8815849 | 918 | S > C |
| CA401327196 | 919 | N > H |
| CA401327211 | 919 | N > S |
| CA401327260 | 922 | P > L |
| VAR_004317 | 927 | T > I |
| CA401327420 | 930 | P > T |
| CA401327438 | 931 | D > G |
| CA8815884 | 935 | L > V |
| CA8815885 | 937 | I > V |
| CA401327760 | 940 | S > L |
| CA8815888 | 943 | M > T |
| CA401327939 | 947 | F > L |
| CA198803 | 949 | V > I |
| CA8815891 | 950 | S > N |
| CA401328038 | 952 | C > G |

(ii) Nucleotide Sequences: N-Terminal GAA Polypeptide Truncations and Nucleic Acid Sequences Encoding GAA Polypeptides and N-Terminal Truncations, with Endogenous or Heterologous Signal Peptides.

[0146] As disclosed herein, the nucleic acids encoding a GAA protein disclosed herein, e.g., SEQ ID NOS: 1-18 that are codon optimized GAA nucleic acid sequence, for example, which have been modified from the NCBI GAA sequence of NM_00152.5 to include, any one or more of (i) enhanced expression in vivo, (ii) reduce CpG islands or reduction or elimination of CG dinucleotides, (iii) to reduce the innate immune response, and (iv) to reduce or eliminate alternative reading frames (ARF), or open reading frames (ORF). Exemplary codon optimized GAA nucleic sequences encompassed for use in the methods and rAAV compositions as disclosed herein can be selected from any of: SEQ ID NO: 3, SEQ ID NO: 4, SEQ ID NO: 5, SEQ ID NO: 6, SEQ ID NO: 7, SEQ ID NO: 8, SEQ ID NO: 9, SEQ ID NO: 10, SEQ ID NO: 11, SEQ ID NO: 12, SEQ ID NO: 13, SEQ ID NO: 14, SEQ ID NO: 15, SEQ ID NO: 16, SEQ ID NO: 17 or SEQ ID NO: 18 as disclosed herein, or a nucleic acid sequence having at least 60%, or 70%, or 80%, 85% or 90% or 95%, or 98%, or 99% sequence identity to SEQ ID NOS: 1-18, where SEQ ID NO: 1-18 or variants of at least 80% sequence identity thereto encode GAA polypeptide, where amino acid at position 199 is R (199R); amino acid at position 233 is H (233H), and amino acid at position 780 is I (780I).

[0147] In some embodiments, codon optimized GAA nucleic sequences encompassed for use in the methods and rAAV compositions as disclosed herein can be selected from any of: SEQ ID NO: 3 or SEQ ID NO: 4, or a nucleic acid sequence having at least 60%, or 70%, or 80%, 85% or 90% or 95%, or 98%, or 99% sequence identity to SEQ ID NO: 3 or SEQ ID NO: 4.

[0148] In some embodiments, the rAAV genome useful in the methods to treat Pompe Disease as disclosed herein comprises a heterologous nucleic acid sequence encoding a signal peptide (SP) fused in frame to the 5′ terminus of a GAA nucleic acid sequence that encodes a GAA polypeptide or N-terminal truncated GAA polypeptide, as disclosed herein. For example, heterologous nucleic acid sequence encoding a signal peptide (SP) is fused in frame to the 5′ terminus of a GAA nucleic acid sequence that encodes the GAA polypeptide or N-terminal truncated GAA polypeptide, so that both polypeptides are expressed from the rAAV genome when the rAAV vector transduces a mammalian cell.

[0149] In some embodiments, the rAAV genome useful in the methods to treat Pompe Disease as disclosed herein comprises a heterologous nucleic acid sequence comprising SEQ ID NO: 3, or a portion of SEQ ID NO: 3, where expression of a portion of the nucleic acid of SEQ ID NO: 3 produces a functional hGAA protein, and where the functional hGAA protein can comprise a N-terminal deletion of SEQ ID NO: 1, or a N-terminal and C-terminal truncation of SEQ ID NO: 1 as disclosed herein.

[0150] In some embodiments, the rAAV genome useful in the methods to treat Pompe Disease as disclosed herein comprises a heterologous nucleic acid sequence comprising SEQ ID NO: 3, or a nucleotides 82-2859 of SEQ ID NO: 3 or a nucleic acid having at least 85% sequence identity thereto, where nucleotides 1-81 of SEQ ID NO: 3 (corresponding to SEQ ID NO: 53) which encodes for a codon optimized hGAA signal peptide are replaced with the nucleic acid encoding a heterologous signal peptide as disclosed herein, e.g., selected from any of SEQ ID NOS: 54-58, 67, 72 or 75, or a nucleotide sequence having at least 85%, or at least 90%, or at least 95%, or at least 97%, or at least 98%, or at least 99% sequence identity thereto.

[0151] In some embodiments, the rAAV genome useful in the methods to treat Pompe Disease as disclosed herein comprises a heterologous nucleic acid sequence that comprises one or more base pair deletions at the 5′ of SEQ ID NO: 3.

[0152] For example, in some embodiments, the heterologous nucleic acid sequence in the AAV genome can comprise nucleotides selected from any of: 82-2859 of SEQ ID NO: 3, 82-2859 bp of SEQ ID NO: 3, 103-2859 bp of SEQ ID NO: 3, 118-2859 of SEQ ID NO: 3, 148-2859 bp of SEQ ID NO: 3, 169-2859 bp of SEQ ID NO: 3, 199-2859 bp of SEQ ID NO: 3, 205-2859 bp of SEQ ID NO: 3, 208-2859 bp of SEQ ID NO: 3, 214-2859 bp of SEQ ID NO: 3, 220-2859 bp of SEQ ID NO: 3, 265-2859 bp of SEQ ID NO: 3, 2335-2859 bp of SEQ ID NO: 3, 2368-2859 bp of SEQ ID NO: 3, 2371-2859 bp of SEQ ID NO: 3, 2374-2859 bp of SEQ ID NO: 3, 2377-2859 bp of SEQ ID NO: 3, 2386-2859 bp of SEQ ID NO: 3 or a nucleic acid having at least 85% sequence identity thereto, and attached to the 5′ of said sequence, nucleotides 1-81 (corresponding to SEQ ID NO: 53 or nucleotide sequence having at least 85%, or at least 90%, or at least 95%, or at least 97%, or at least 98%, or at least 99% sequence identity thereto) of SEQ ID NO: 3, which encodes for a codon optimized hGAA signal peptide.

[0153] In an alternative embodiment, the heterologous nucleic acid sequence in the AAV genome can comprise nucleotides selected from any of: 82-2859 of SEQ ID NO: 3, 82-2859 bp of SEQ ID NO: 3, 103-2859 bp of SEQ ID NO: 3, 118-2859 of SEQ ID NO: 3, 148-2859 bp of SEQ ID NO: 3, 169-2859 bp of SEQ ID NO: 3, 199-2859 bp of SEQ ID NO: 3, 205-2859 bp of SEQ ID NO: 3, 208-2859 bp of SEQ ID NO: 3, 214-2859 bp of SEQ ID NO: 3, 220-2859 bp of SEQ ID NO: 3, 265-2859 bp of SEQ ID NO: 3, 2335-2859 bp of SEQ ID NO: 3, 2368-2859 bp of SEQ ID NO: 3, 2371-2859 bp of SEQ ID NO: 3, 2374-2859 bp of SEQ ID NO: 3, 2377-2859 bp of SEQ ID NO: 3, 2386-2859 bp of SEQ ID NO: 3 or a nucleic acid having at least 85% sequence identity thereto, where nucleotides 1-81 (corresponding to SEQ ID NO: 53) of SEQ ID NO: 3, which encodes for a codon optimized hGAA signal peptide, are replaced with the nucleic acid encoding a heterologous signal peptide as disclosed herein, e.g., selected from any of SEQ ID NOS: 54-58, 67, 72 or 75, or a nucleotide sequence having at least 85%, or at least 90%, or at least 95%, or at least 97%, or at least 98%, or at least 99% sequence identity thereto.

[0154] The truncated GAA can be wildtype or codon optimized. For example, exemplary 5′ deletions of SEQ ID NO: 3 are disclosed in Table 1 herein, which encode for N-terminal truncated GAA polypeptide. In some embodiments, the 5′ of the 5′ deletions of SEQ ID NO: 3 can be attached to the 3′ of a nucleic acid encoding a signal peptide as disclosed herein, e.g., any signal peptide selected from any of SEQ ID NOS: 53-58, 67, 72 or 75, or a nucleotide sequence having at least 85%, or at least 90%, or at least 95%, or at least 97%, or at least 98%, or at least 99% sequence identity thereto.

TABLE 1
Table of exemplary N-terminal truncations of GAA polypeptide of SEQ ID
NO: 1, and the 5′ deletions of nucleic acid sequence of SEQ ID NO: 3.

| | | Corresponding nucleotides of |
|---|---|---|
| | Corresponding amino acid | coGAA nucleic acid of SEQ ID |
| N-terminal GAA truncation | residues of SEQ ID NO: 1 | NO: 3 (Seq100) |
| Signal peptide (which can be | residues 1-27 of SEQ ID NO: 1 | Nucleotides 1-81 of SEQ ID |
| removed and replaced with a | MGVRHPPCSHRLLAVCALVSL | NO: 3 |
| heterologous signal peptide | ATAALL (SEQ ID NO: 59) | ATGGGGGTGAGGCACCCTCC [symbol] |
| as disclosed herein) | | TGTTCTCACAGGCTGCTGGCT |
| | | GTGTGTGCTCTGGTGTCTCTG [symbol] |
| | | CCACTGCTGCCCTGCTG (SEQ |
| | | ID NO: 53) |
| hGAA polypeptide starting at | residues 28-952 of | 82-2859 bp of SEQ ID NO: 3 |
| residue 28 (removal of GAA | SEQ ID NO: 1 | |
| signal peptide) | | |
| hGAA polypeptide starting at | residues 35-952 of | 103-2859 bp of SEQ ID NO: 3 |
| residue 35 (A1-34 of SEQ ID | SEQ ID NO: 1 | |
| NO: 1) | | |
| hGAA polypeptide starting at | residues 40-952 of | 118-2859 of SEQ ID NO: 3 |
| residue 40 (A1-39 of SEQ ID | SEQ ID NO: 1 | |
| NO: 1) | | |
| hGAA polypeptide starting at | residues 50-952 of | 148-2859 bp of SEQ ID NO: 3 |
| residue 50 (A1-49 of SEQ ID | SEQ ID NO: 1 | |
| NO: 1) | | |
| hGAA polypeptide starting at | residues 57-952 of | 169-2859 bp of SEQ ID NO: 3 |
| residue 57 (A1-56 of SEQ ID | SEQ ID NO: 1 | |
| NO: 1) | | |
| hGAA polypeptide starting at | residues 68-952 of | 199-2859 bp of SEQ ID NO: 3 |
| residue 68 (A1-67 of SEQ ID | SEQ ID NO: 1 | |
| NO: 1) | | |
| hGAA polypeptide starting at | residues 69-952 of | 205-2859 bp of SEQ ID NO: 3 |
| residue 69 (A1-68 of SEQ ID | SEQ ID NO: 1 | |
| NO: 1) | | |
| hGAA polypeptide starting at | residues 70-952 of | 208-2859 bp of SEQ ID NO: 3 |
| residue 70 (A1-69 of SEQ ID | SEQ ID NO: 1 | |
| NO: 1) | | |
| hGAA polypeptide starting at | residues 72-952 of | 214-2859 bp of SEQ ID NO: 3 |
| residue 72 (A1-71 of SEQ ID | SEQ ID NO: 1 | |
| NO: 1) | | |
| hGAA polypeptide starting at | residues 74-952 of | 220-2859 bp of SEQ ID NO: 3 |
| residue 74 (A1-73 of SEQ ID | SEQ ID NO: 1 | |
| NO: 1) | | |
| hGAA polypeptide starting at | residues 89-952 of | 265-2859 bp of SEQ ID NO: 3 |
| residue 89 (A1-88 of SEQ ID | SEQ ID NO: 1 | |
| NO: 1) | | |
| hGAA polypeptide starting at | residues 779-952 of | 2335-2859 bp of SEQ ID NO: 3 |
| residue 779 (A1-778 of SEQ ID | SEQ ID NO: 1 | |
| NO: 1) | | |
| hGAA polypeptide starting at | residues 790-952 of | 2368-2859 bp of SEQ ID NO: 3 |
| residue 790 (A1-789 of SEQ ID | SEQ ID NO: 1 | |
| NO: 1) | | |
| hGAA polypeptide starting at | residues 791-952 of | 2371-2859 bp of SEQ ID NO: 3 |
| residue 791 (A1-790 of SEQ ID | SEQ ID NO: 1 | |
| NO: 1) | | |
| hGAA polypeptide starting at | residues 792-952 of | 2374-2859 bp of SEQ ID NO: 3 |
| residue 792 (A1-791 of SEQ ID | SEQ ID NO: 1 | |
| NO: 1) | | |
| hGAA polypeptide starting at | residues 793-952 of | 2377-2859 bp of SEQ ID NO: 3 |
| residue 793 (A1-792 of SEQ ID | SEQ ID NO: 1 | |
| NO: 1 of SEQ ID NO: 1) | | |
| hGAA polypeptide starting at | residues 796-952 of | 2386-2859 bp of SEQ ID NO: 3 |
| residue 796 (A1-795 of SEQ ID | SEQ ID NO: 1 | |
| NO: 1) | | |

[symbol]

indicates data missing or illegible when filed

[0155] In some embodiments, the rAAV genome useful in the methods to treat Pompe Disease as disclosed herein comprises a heterologous nucleic acid sequence that comprises nucleotides 103-2859 of SEQ ID NO: 3, where attached to the 5′ of said sequence, there is nucleic acid encoding a wildtype or codon optimized hGAA signal peptide (i.e., a nucleic acid comprising SEQ ID NO: 53), or fragment thereof, or a nucleic acid sequence encoding a heterologous signal peptide as disclosed herein, e.g., a nucleic acid sequence selected from any of SEQ ID NOS: 54-58, 67, 72 or 75, or a nucleotide sequence having at least 85%, or at least 90%, or at least 95%, or at least 97%, or at least 98%, or at least 99% sequence identity thereto.

[0156] In some embodiments, the rAAV genome useful in the methods to treat Pompe Disease as disclosed herein comprises a heterologous nucleic acid sequence that comprises nucleotides 118-2859 of SEQ ID NO: 3, where attached to the 5′ of said sequence, there is nucleic acid encoding a wildtype or codon optimized hGAA signal peptide (i.e., a nucleic acid comprising SEQ ID NO: 53) or a nucleic acid sequence encoding a heterologous signal peptide as disclosed herein, e.g., a nucleic acid sequence selected from any of SEQ ID NOS: 54-58, 67, 72 or 75, or a nucleotide sequence having at least 85%, or at least 90%, or at least 95%, or at least 97%, or at least 98%, or at least 99% sequence identity thereto.

[0157] In some embodiments, the rAAV genome useful in the methods to treat Pompe Disease as disclosed herein comprises a heterologous nucleic acid sequence that comprises nucleotides 148-2859 of SEQ ID NO: 3, where attached to the 5′ of said sequence, there is nucleic acid encoding a wildtype or codon optimized hGAA signal peptide (i.e., a nucleic acid comprising SEQ ID NO: 53) or a nucleic acid sequence encoding a heterologous signal peptide as disclosed herein, e.g., a nucleic acid sequence selected from any of SEQ ID NOS: 54-58, 67, 72 or 75, or a nucleotide sequence having at least 85%, or at least 90%, or at least 95%, or at least 97%, or at least 98%, or at least 99% sequence identity thereto.

[0158] In some embodiments, the rAAV genome useful in the methods to treat Pompe Disease as disclosed herein comprises a heterologous nucleic acid sequence that comprises nucleotides 169-2859 of SEQ ID NO: 3, attached to the 5′ of said sequence, there is nucleic acid encoding, e.g., a codon optimized hGAA signal peptide (i.e., a nucleic acid comprising SEQ ID NO: 53) or a nucleic acid sequence encoding a heterologous signal peptide as disclosed herein, e.g., a nucleic acid sequence selected from any of SEQ ID NOS: 54-58, 67, 72 or 75, or a nucleotide sequence having at least 85%, or at least 90%, or at least 95%, or at least 97%, or at least 98%, or at least 99% sequence identity thereto.

[0159] In some embodiments, the rAAV genome useful in the methods to treat Pompe Disease as disclosed herein comprises a heterologous nucleic acid sequence that comprises nucleotides 199-2859 of SEQ ID NO: 3, where attached to the 5′ of said sequence, there is nucleic acid encoding a wildtype or codon optimized hGAA signal peptide (i.e., a nucleic acid comprising SEQ ID NO: 53), or fragment thereof and/or a nucleic acid sequence encoding a heterologous signal peptide as disclosed herein, e.g., a nucleic acid sequence selected from any of SEQ ID NOS: 54-58, 67, 72 or 75, or a nucleotide sequence having at least 85%, or at least 90%, or at least 95%, or at least 97%, or at least 98%, or at least 99% sequence identity thereto.

[0160] In some embodiments, the rAAV genome useful in the methods to treat Pompe Disease as disclosed herein comprises a heterologous nucleic acid sequence that comprises nucleotides 205-2859 or nucleotides 208-2859, or nucleotides 214-2859 of SEQ ID NO: 3, where attached to the 5′ of said sequence, there is nucleic acid encoding a wild-type or codon optimized hGAA signal peptide (i.e., a nucleic acid comprising SEQ ID NO: 53) and/or a nucleic acid sequence encoding a heterologous signal peptide as disclosed herein, e.g., a nucleic acid sequence selected from any of SEQ ID NOS: 54-58, 67, 72 or 75, or a nucleotide sequence having at least 85%, or at least 90%, or at least 95%, or at least 97%, or at least 98%, or at least 99% sequence identity thereto.

[0161] In some embodiments, the rAAV genome useful in the methods to treat Pompe Disease as disclosed herein comprises a heterologous nucleic acid sequence that comprises nucleotides 220-2859 or nucleotides 208-2859, or nucleotides 214-2859 of SEQ ID NO: 3, where attached to the 5′ of said sequence, there is nucleic acid encoding a wild-type or codon optimized hGAA signal peptide (i.e., a nucleic acid comprising SEQ ID NO: 53) and/or a nucleic acid sequence encoding a heterologous signal peptide as disclosed herein, e.g., a nucleic acid sequence selected from any of SEQ ID NOS: 54-58, 67, 72 or 75, or a nucleotide sequence having at least 85%, or at least 90%, or at least 95%, or at least 97%, or at least 98%, or at least 99% sequence identity thereto.

[0162] In some embodiments, the rAAV genome useful in the methods to treat Pompe Disease as disclosed herein comprises a heterologous nucleic acid sequence that comprises any of: nucleotides 265-2859 of SEQ ID NO: 3, or nucleotides 2335-2859 of SEQ ID NO: 3, or nucleotides 2368-2859 of SEQ ID NO: 3, or nucleotides 2371-2859 bp of SEQ ID NO: 3, where attached to the 5′ of said sequence, there is nucleic acid encoding a wildtype or codon optimized hGAA signal peptide (i.e., a nucleic acid comprising SEQ ID NO: 53), or fragment thereof, and/or a nucleic acid sequence encoding a heterologous signal peptide as disclosed herein, e.g., a nucleic acid sequence selected from any of SEQ ID NOS: 54-58, 67, 72 or 75, or a nucleotide sequence having at least 85%, or at least 90%, or at least 95%, or at least 97%, or at least 98%, or at least 99% sequence identity thereto.

[0163] In some embodiments, the rAAV genome useful in the methods to treat Pompe Disease as disclosed herein comprises a heterologous nucleic acid sequence that encodes a signal sequence as disclosed herein, and a GAA polypeptide or a N-terminal truncated GAA polypeptide, where the GAA polypeptide begins at amino acid residues selected from any of: 28, 35, 40, 50, 57, 57, 68, 69, 70, 72, 74, 89, 779, 790, 791, 792, 793 or 796, and optionally, where the GAA polypeptide also has a C-terminal deletion of at least about 10, or about 20, or about 30, or about 40, or about 50, or about 60, or about 70, or about 80, or about 90, or about 100, or about 110, or more than 110 amino acid residues from the C-terminus of SEQ ID NO: 1. In some embodiment, the rAAV genome useful in the methods to treat Pompe Disease as disclosed herein comprises a heterologous nucleic acid sequence that encodes a signal sequence as disclosed herein, and a GAA polypeptide or a N-terminal truncated GAA polypeptide, where the GAA polypeptide begins at amino acid residues selected from any of: 28, 35, 40, 50, 57, 57, 68, 69, 70, 72, 74, 89, 779, 790, 791, 792, 793 or 796, and where the C-terminal of the GAA polypeptide occurs at any residue after amino acid residue 500, 600, 700, 800, 842, 852, 862, 875, 885, 895, 900, 905, 915, 920, 925, 930, 935, 940, 945, 950, 951 of SEQ ID NO. 1.

[0164] In some embodiments, the rAAV genome useful in the methods to treat Pompe Disease as disclosed herein comprises a heterologous nucleic acid sequence that (i) encodes a wildtype or codon optimized hGAA signal peptide (i.e., a nucleic acid comprising SEQ ID NO: 53), or fragment thereof and/or a nucleic acid sequence encoding a heterologous signal peptide as disclosed herein, e.g., a nucleic acid sequence selected from any of SEQ ID NOS: 54-58, 67, 72 or 75, or a nucleotide sequence having at least 85%, or at least 90%, or at least 95%, or at least 97%, or at least 98%, or at least 99% sequence identity to SEQ ID NOS 53-58, 67, 72 or 65, and (ii) encodes a GAA polypeptide, the GAA polypeptide encoded by a nucleic acid sequence beginning at base pairs selected from any of: 82, 103, 118, 148, 169, 199, 205, 208, 214, 220, 265 of SEQ ID NO: 3, and ending at base pair selected from any of: 2553 (i.e., deletion of 100 C-terminal residues, ends at 851aa), 2583 (i.e., deletion of 90 C-terminal residues, ends at 861aa), 2613 (i.e., deletion of 80 C-terminal residues, ends at 871aa), 2643 (i.e., deletion of 70 C-terminal residues, ends at 871aa), 2673 (i.e., deletion of 60 C-terminal residues, ends at 881aa), 2703 (i.e., deletion of 50 C-terminal residues, ends at 891aa), 2733 (i.e., deletion of 40 C-terminal residues, ends at 901aa), 2763 (i.e., deletion of 30 C-terminal residues, ends at 911aa), 2823 (i.e., deletion of 20 C-terminal residues, ends at 921aa), 2775 (i.e., deletion of 27 C-terminal residues, ends at 925aa), 2826 (i.e., deletion of 10 C-terminal residues, ends at 942aa) of SEQ ID NO: 3, or ending anywhere between base pairs 2553-2859 of SEQ ID NO: 3.

### B. Signal Peptide (SP)

[0165] The native GAA signal peptide is not cleaved in the ER thereby causing native GAA polypeptide to be membrane bound in the ER (Tsuji et al. (1987) Biochem. Int. 15(5):945-952). Disruption of the membrane association of GAA can be accomplished by replacing the endogenous GAA signal peptide (and optionally adjacent sequences) with an alternate signal peptide for GAA.

[0166] Accordingly, in representative embodiments, the rAAV vector and rAAV genome useful in the methods to treat Pompe disease as disclosed herein further comprises a heterologous nucleic acid encoding a GAA polypeptide to be transferred to a target cell, attached to a heterologous nucleic acid sequence that encodes a heterologus signal peptide in the place of the endogenous GAA signal peptide. The heterologous nucleic acid encoding a GAA polypeptide, including N-terminal truncations of the GAA polypeptide, which is is operatively associated with the segment encoding the secretory signal peptide, such that upon transcription and translation a fusion polypeptide is produced containing the secretory signal sequence operably associated with (e.g., directing the secretion of) the GAA polypeptide or N-terminal truncated GAA polypeptide.

[0167] In some embodiments, the endogenous signal peptide of hGAA (i.e., amino acids 1-27 of SEQ ID NO: 1 (encoded by a codon optimized nucleic acid sequence corresponding to SEQ ID NO: 59)) is replaced with a heterologous signal peptide (also referred to herein as a “signal sequence” or “leader sequence”) of SEQ ID NO: 60 (201 IgG signal peptide), or an IL2 wild type signal peptide (SEQ ID NO: 61), modified IL2 signal peptide (SEQ ID NO: 62), A2M signal peptide (SEQ ID NO: 63), or PZP signal peptide (SEQ ID NO: 64), or artificial signal peptide (SEQ ID NO: 65), or cathpetsin L signal peptide (SEQ ID NO: 66) or signal peptides at least 90% sequence identity to SEQ ID NOS: 60-66.

[0168] In some embodiments, the AAV vector encodes a GAA polypeptide that comprises the endogenous GAA signal peptide (e.g., amino acids 1-27 of SEQ ID NO: 1 (also referred to as “innate GAA” or “cognate GAA” signal peptide). In some embodiments, the AAV vector encodes a GAA polypeptide that comprises the endogenous GAA signal peptide (e.g., amino acids 1-27 of SEQ ID NO: 1, or a portions thereof) and an additional heterologous (i.e., non native) signal sequence. In some embodiments, the GAA polypeptide or N-terminal GAA polypeptide disclosed herein that lacks the endogenous signal peptide of amino acids 1-27 of GAA of SEQ ID NO: 1 is fused to a heterolous signal peptide (also referred to as “secretory signal peptide”).

[0169] In a particular embodiment, the heterologous nucleic acid sequence encodes a GAA polypeptide comprising a signal peptide fused to the GAA polypeptide, wherein the signal peptide is a heterologous GAA polypeptide. In some embodiments, the heterologous nucleic acid encoding a GAA polypeptide fused to a heterologous (e.g., exogenous or non-GAA) signal peptide can further comprise, at the 5′ end, a nucleic acid sequence encoding a portion of the cognate (e.g., endogenous) GAA signal peptide, e.g., encoding at least 1-5, or at least 1-10, or at least 1-20, or at least about 1-23, or at least about 1-24, or at least about 1-25, or at least about 1-26, or the entire GAA signal peptide, e.g., or at least about 1-27 concecutive amino acids of the endogenous GAA signal peptide. Stated differently, in some embodiments, the heterologous nucleic acid sequence can comprise, in the 5′ to 3′ direction, a nucleic acid sequence encoding the entire GAA signal peptide of SEQ ID NO: 59 or a portion of the endogenous GAA signal peptide of SEQ ID NO: 59, a nucleic acid sequence encoding a heterologous signal peptide (e.g., non-GAA signal peptide) and a a nucleic acid sequence encoding a GAA polypeptide, such as the wild-type nucleic acid sequences, or a sequence encoding at least 1-3 amino acid variants, or a codon-optimized nucleic acid sequence encoding a GAA polypeptide, including N-terminal GAA truncations. For example, in some embodiments, the nucleic acid sequence encoding the GAA polypeptide encodes a N-terminal truncated GAA polypeptide, such as those disclosed in Table 1 herein.

[0170] In some embodiments, the order of the signal peptides are changed, for example, in some embodiments, the heterologous nucleic acid sequence can comprise, in the 5′ to 3′ direction, a nucleic acid sequence encoding a heterologous signal peptide as disclosed herein, the entire GAA signal peptide of SEQ ID NO: 59 or a portion of the endogenous GAA signal peptide of SEQ ID NO: 59 and a wildtype or codon-optimized nucleic acid sequence encoding a GAA polypeptide, including N-terminal GAA truncations.

[0171] In some embodiments, there can be a portion of the GAA polypeptide, e.g., any 1 amino acid, or 2 amino acids or more than 2 concecutive amino acids located in the region of amino acids 28-56 of SEQ ID NO: 1) located between the GAA signal peptide (or portion thereof), and the heterologous signal peptide and upstream (e.g., N-terminal) of a N-terminal truncated GAA polypeptide. For example, and without wishing to be bound by theory, in some embodiments, the heterologous nucleic acid sequence can comprise, in the 5′ to 3′ direction, (i) the entire full length GAA signal peptide or a portion thereof as disclosed herein, (ii) a portion of at the the GAA polypeptide, e.g., amino acids 28-35 of SEQ ID NO: 1, amino acid 28 of SEQ ID NO: 1, or amino acids 28-31 of SEQ ID NO: 1, (iii) a heterologous signal peptide, and (iv) a GAA polypeptide, e.g., a N-terminal truncated GAA polypeptide beginning at amino acid 57 of SEQ ID NO: 1. It is envisioned that the portion of at the the GAA polypeptide located between the GAA polypeptide and the heterologous signal peptide can be any length, e.g., at least 1, 2, 3, 4, 5, 6, 7, 8, 9, 10, 10-12, 12,-14, 14,-16, 16-18, 18-20, or more than 20 amino acids of residues 28-56 of SEQ ID NO: 1, and the N-terminal GAA polypetide does not need to start at the next or sequential amino acid of the earlier GAA polypeptide portion. Certain of the amino acids in this 28-56 amino acid region can cause cellular retention. In one embodiment, those amino acids are removed or replaced.

[0172] In some embodiments, the nucleic acid sequence that encodes a GAA-signal peptide encodes at least 1-5, or at least 1-10, or at least 1-20, or at least about 1-23, or at least about 1-24, or at least about 1-25, or at least about 1-26, or at least about 1-27 concecutive amino acids (i.e., the full GAA signal peptide sequence), or non-concecutive amino acids of the endogenous GAA signal peptide of SEQ ID NO: 59. In some embodiments, the nucleic acid sequence encoding a GAA-signal peptide encodes a GAA signal peptide that comprises at least one deletion of at least 1, or at least 2, or at least 3, or at least 4, or at least 5, or at least 6, or at least 7, or at least 8, or at least 9, or at least 10, or at least 11, or at least 12, or at least 13, or at least 14, or at least 15, or at least 16, or at least 17, or at least 18, or at least 19, or at least 20 amino acids of SEQ ID NO: 59, where the one or more deletions can be concecutive, or non-concecutive deletions.

[0173] In some embodiments, the nucleic acid sequence that encodes a GAA-signal peptide can comprise the entire nucleic acid of SEQ ID NO: 57 (encoding GAA signal peptide comprising amino acids 1-27 of SEQ ID NO: 59). In alternative embodiments, the nucleic acid sequence that encodes a GAA-signal peptide can comprise a portion of the nucleic acid sequence of SEQ ID NO: 53, e.g., portions of SEQ ID NO: 53 that are selected from concecutive bases of SEQ ID NO: 53 having the length of any of: 1-3 bp, 1-4 bp, 1-5 bp, 1-6 bp, 1-7 bp, 1-8 bp, 1-9 bp, 1-10 bp, 1-11 bp, 1-12 bp, 1- 13 bp, 1-14 bp, 1-15 bp, 1-16 bp, 1-17 bp, 1-18 bp, 1-19 bp, 1-20 bp, 1-21 bp, 1-22 bp, 1-23 bp, 1-24 bp, 1- 25 bp, 1-26 bp, 1-27 bp, 1-28 bp, 1-29 bp, 1-30 bp, 1-33 bp, 1-36 bp, 1-39 bp, 1-42 bp, 1-45 bp, 1-48 bp, 1- 51 bp, 1-54 bp, 1-57 bp, 1-60 bp, 1-63 bp, 1-66 bp, 1-69 bp, 1-72b, 1-75 bp and 1-78 bp in any region of the nucleic acid sequence of SEQ ID NO: 53. That is, using a 21 bp portion of SEQ ID NO: 53 as an exemplary example, the GAA signal peptide can comprise a nucleic acid that is a 21 bp portion of SEQ ID NO: 53, where the 21 bp can be any 21-consecutive base pairs of SEQ ID NO: 53. For example, a 1-21 bp portion beginning at base pair 1 of SEQ ID NO: 53 would encode for a GAA-signal peptide comprising amino acids 1-7 of SEQ ID NO: 59, whereas a 1-21 bp portion beginning at base pair 15 of SEQ ID NO: 53 would encode for a GAA-signal peptide comprising amino acids 5-12 of SEQ ID NO: 59. In some embodiments, a portion of the GAA signal peptide of SEQ ID NO: 59 is the N-terminal portion of SEQ ID NO: 59 (i.e., has a deletion of at least 1, or at least 2, or at least 3, or at least 4, or at least 5, or at least 6, or at least 7, or at least 8, or at least 9, or at least 10, or at least 11, or at least 12, or at least 13, or at least 14 or at least 15 amino acids, or more than 15 amino acids at the C-terminal of SEQ ID NO: 59).

[0174] In some embodiments, the nucleic acid encoding a heterologous signal peptide as disclosed herein can be inserted into the nucleic acid sequence encoding a GAA-signal peptide. The insertion can occur at any location in the 1-81 bp of SEQ ID NO: 53. In some embodiments, a nucleic acid sequence encoding a heterologous signal peptide as disclosed herein is inserted in a portion of the nucleic acid encoding a GAA-signal peptide, e.g., generating a chimeric signal peptide comprising, for example, a 5′ nucleic acid sequence encoding a portion of a GAA signal peptide (e.g., a portion of SEQ ID NO: 53, as discussed above) and attached to the 3′ of said sequence, a nucleic acid encoding a heterologous signal peptide as disclosed herein. In some embodiments, there can also be a nucleic acid encoding a N-terminal portion of the GAA polypeptide with a deletion of amino acids thereafter, e.g., encoding amino acids 28, 28-29, 28-30, 28-31, 28-32, 28-33 etc., of SEQ ID NO: 1 followed by a deletion of about 4-40 amino acids of SEQ ID NO:1. In some embodiments, a heterologous signal peptide can be inserted immediately following the N-terminal amino acids, e.g., after position 28, 29, 30, 31, 32 or 33.

[0175] In some embodiments of the compositions and methods described herein, the signal peptides serve a general purpose of assisting the secretion of the GAA polypeptide from the liver cells into the blood, where it can travel and be targeted to the lysosomes of mammalian cells, for example, human cardiac and skeletal muscle cells, as described herein. In some embodiments, a heterologous signal peptide is selected from any of: a AAT signal peptide, a fibronectin signal peptide (FN1), 201 signal peptide, wtIL2 signal peptide, mutIL2 signal peptide, A2M signal peptide, PZP signal peptide, or an active fragment of AAT, FN1, 201, wtIL2, mutIL2, A2M or PZP signal peptide having secretory signal activity.

[0176] In some embodiments, the signal peptide is heterologous to (i.e., foreign or exogenous to) the polypeptide of interest. For example, a heterologous signal peptide is a fibronectin secretory signal peptide, the polypeptide of interest is not fibronectin. In some embodiments, the signal peptide is selected from any of: FN1, 201 signal peptide, wtIL2 signal peptide, mutIL2 signal peptide, A2M signal peptide, PZP signal peptide having secretory signal activity. In alternative embodiments, the signal peptide is not heterologous to GAA, i.e., the signal peptide is the GAA signal peptide (i.e., residues 1-27 of SEQ ID NO: 1, which the endogenous GAA polypeptide).

[0177] In some embodiments, the endogenous GAA signal sequence of amino acids 1-27 of SEQ ID NO: 1 (i.e., MGVRHPPCSHRLLAVCALVSLATAALL, SEQ ID NO: 59) is replaced with a different signal peptide (leader peptide). For example, the endogenous signal peptide of GAA (SEQ ID NO: 59) can be replaced with any of: (i) an IgG1 signal peptide (referred to herein as a “201 signal peptide” or “201Ip” having an amino acid sequence of: MEFGLSWVFLVALLKGVQCE (SEQ ID NO: 60) encoded by nucleic acid sequence SEQ ID NO: 54, (ii) wtIL2 lp: MYRMQLLSCIALSLALVTNS (SEQ ID NO: 61) encoded by nucleic acid sequence SEQ ID NO: 55, or (iii) mutIL2 lp: MYRMQLLLLIALSLALVTNS (SEQ ID NO: 62) encoded by nucleic acid sequence SEQ ID NO: 56, (iv) A2M signal peptide MGKNKLLHPSLVLLLLVLLPTDA (SEQ ID NO: 63) encoded by nucleic acid sequence SEQ ID NO: 57, (iv) PZP signal peptide MRKDRLLHLCLVLLLILLSASDSNS (SEQ ID NO: 64) encoded by nucleic acid sequence SEQ ID NO: 58. In some embodiments, the heterologous signal peptide can be truncated.

[0178] In some embodiments, the endogenous GAA signal peptide (SEQ ID NO: 59) or a fragment or portion thereof remains present, and an additional signal peptide is added, e.g., any one or more of signal peptides AAT, FN1, 201 signal peptide, wtIL2 signal peptide, mutIL2 signal peptide, A2M signal peptide, PZP signal peptide, as disclosed herein. In some embodiments, the endogenous GAA signal peptide of amino acids 1-27 of SEQ ID NO: 1 (i.e., MGVRHPPCSHRLLAVCALVSLATAALL, SEQ ID NO: 59) is replaced with a different or heterologous signal peptide. For example, the endogenous signal peptide of GAA (SEQ ID NO: 59) can be replaced with any of the heterologous signal peptides selected from: (i) an IgG1 signal peptide (referred to herein as a “201 signal peptide” or “201 lp” having an amino acid sequence of: MEFGLSWVFLVALLKGVQCE (SEQ ID NO: 60) encoded by nucleic acid sequence SEQ ID NO: 54, (ii) wtIL2 lp: MYRMQLLSCIALSLALVTNS (SEQ ID NO: 61) encoded by nucleic acid sequence SEQ ID NO: 55, or (iii) mutIL2 lp: MYRMQLLLLIALSLALVTNS (SEQ ID NO: 62) encoded by nucleic acid sequence SEQ ID NO: 56, (iv) A2M signal peptide MGKNKLLHPSLVLLLLVLLPTDA (SEQ ID NO: 63) encoded by nucleic acid sequence SEQ ID NO: 57, (iv) PZP signal peptide MRKDRLLHLCLVLLLILLSASDSNS (SEQ ID NO: 64) encoded by nucleic acid sequence SEQ ID NO: 58.

[0179] In some embodiments, the nucleic acid sequences in the rAAV vector or rAAV genome is a sequence selected from SEQ ID NO: 470-515. In one embodiment, the nucleic acid sequences in the rAAV vector or rAAV genome comprises at least a portion of a sequence selected from SEQ ID NO: 470-515 (i.e., a sequence that is at least 10%, 20%, 30%, 40%, 50%, 60%, 70%, 80%, 90%, 95% or more of the sequence of SEQ ID NO: 470-515).

[0180] In some embodiments, exemplary nucleic acid sequences in the rAAV vector or rAAV genome as disclosed herein are shown in exemplary constructs provided herein below:
[0181] pP065, is a plasmid comprising in the 5′ to 3′ direction: [L-ITR]-[(LSP:Liver Specific Promoter)]-[5′UTR]-[1-28aa GAA-SP]-[GAA polypeptide starting at amino acid 57 of SEQ ID NO:1]-[3′UTR]-[hGH polyA signal and Terminator]-[RNA polymerase II transcriptional pause signal]-[R-ITR]. See, e.g., SEQ ID NO: 470.
[0182] pP066, is a plasmid comprising in the 5′ to 3′ direction: [L-ITR]-[(LSP:Liver Specific Promoter)]-[5′UTR]-[1-28aa GAA-SP]-[GAA polypeptide starting at amino acid 57 of SEQ ID NO:1]-[3′UTR]-[hGH polyA signal and Terminator]-[RNA polymerase II transcriptional pause signal]-[R-ITR]. See, e.g., SEQ ID NO: 471.
[0183] pP067, is a plasmid comprising in the 5′ to 3′ direction: [L-ITR]-[(LSP:Liver Specific Promoter)]-[5′UTR]-[aa1 from GAA-SP]-[28-31aa GAA]-[IL-2 signal sequence]-[GAA polypeptide starting at amino acid 57 of SEQ ID NO:1]-[3′UTR]-[hGH polyA signal and Terminator]-[RNA polymerase II transcriptional pause signal]-[R-ITR]. See, e.g., SEQ ID NO: 472.
[0184] pP068, is a plasmid comprising in the 5′ to 3′ direction: [L-ITR]-[(LSP:Liver Specific Promoter)]-[5′UTR]-[aa1 from GAA-SP]-[28-31aa GAA]-[201Ig]-[GAA polypeptide starting at amino acid 57 of SEQ ID NO:1]-[3′UTR]-[hGH polyA signal and Terminator]-[RNA polymerase II transcriptional pause signal]-[R-ITR]. See, e.g., SEQ ID NO: 473.
[0185] pP069, is a plasmid comprising in the 5′ to 3′ direction: [L-ITR]-[(LSP:Liver Specific Promoter)]-[5′UTR]-[aa1 from GAA-SP from seq100]-[28-31aa GAA from seq3]-[IL-2 signal sequence]-[GAA polypeptide starting at amino acid 57 of seq3]-[3′UTR]-[hGH polyA signal and Terminator]-[RNA polymerase II transcriptional pause signal]-[ITR-neighborhood]-[R-ITR]. See, e.g., SEQ ID NO: 474.
[0186] pP070, is a plasmid comprising in the 5′ to 3′ direction: [L-ITR]-[(LSP:Liver Specific Promoter)]-[5′UTR]-[aa1 from GAA-SP]-[28-31aa GAA]-[201Ig]-[GAA polypeptide starting at amino acid 57 of SEQ ID NO:1]-[3′UTR]-[hGH polyA signal and Terminator]-[RNA polymerase II transcriptional pause signal]-[R-ITR]. See, e.g., SEQ ID NO: 475.
[0187] pP071, is a plasmid comprising in the 5′ to 3′ direction: [L-ITR]-[(LSP:Liver Specific Promoter)]-[5′UTR]-[1-24aa GAA]-[IL-2 signal sequence]-[GAA polypeptide starting at amino acid 57 of SEQ ID NO:1]-[3′UTR]-[hGH polyA signal and Terminator]-[RNA polymerase II transcriptional pause signal]-[R-ITR]. See, e.g., SEQ ID NO: 476.
[0188] pP072, is a plasmid comprising in the 5′ to 3′ direction: [L-ITR]-[(LSP:Liver Specific Promoter)]-[5′UTR]-[1-24aa GAA]-[201Ig]-[GAA polypeptide starting at amino acid 57 of SEQ ID NO:1]-[3′UTR]-[hGH polyA signal and Terminator]-[RNA polymerase II transcriptional pause signal]-[R-ITR]. See, e.g., SEQ ID NO: 477.
[0189] pP073, is a plasmid comprising in the 5′ to 3′ direction: [L-ITR]-[(LSP:Liver Specific Promoter)]-[5′UTR]-[1-24aa GAA]-[IL-2 signal sequence]-[GAA polypeptide starting at amino acid 57 of SEQ ID NO:1]-[3′UTR]-[hGH polyA signal and Terminator]-[RNA polymerase II transcriptional pause signal]-[R-ITR]. See, e.g., SEQ ID NO: 478.
[0190] pP074, is a plasmid comprising in the 5′ to 3′ direction: [L-ITR]-[(LSP:Liver Specific Promoter)]-[5′UTR]-[1-24aa GAA]-[201Ig]-[GAA polypeptide starting at amino acid 57 of SEQ ID NO:1]-[3′UTR]-[hGH polyA signal and Terminator]-[RNA polymerase II transcriptional pause signal]-[R-ITR]. See, e.g., SEQ ID NO: 479.
[0191] pP075, is a plasmid comprising in the 5′ to 3′ direction: [L-ITR]-[(LSP:Liver Specific Promoter)]-[5′UTR]-[1-23aa GAA]-[IL-2 signal sequence]-[GAA polypeptide starting at amino acid 57 of SEQ ID NO:1]-[3′UTR]-[hGH polyA signal and Terminator]-[RNA polymerase II transcriptional pause signal]-[R-ITR]. See, e.g., SEQ ID NO: 480.
[0192] pP076, is a plasmid comprising in the 5′ to 3′ direction: [L-ITR]-[(LSP:Liver Specific Promoter)]-[5′UTR]-[1-23aa GAA]-[201Ig]-[GAA polypeptide starting at amino acid 57 of SEQ ID NO:1]-[3′UTR]-[hGH polyA signal and Terminator]-[RNA polymerase II transcriptional pause signal]-[R-ITR]. See, e.g., SEQ ID NO: 481.
[0193] pP077, is a plasmid comprising in the 5′ to 3′ direction: [L-ITR]-[(LSP:Liver Specific Promoter)]-[5′UTR]-[1-23aa GAA]-[IL-2 signal sequence]-[GAA polypeptide starting at amino acid 57 of SEQ ID NO:1]-[3′UTR]-[hGH polyA signal and Terminator]-[RNA polymerase II transcriptional pause signal [R-ITR]. See, e.g., SEQ ID NO: 482.
[0194] pP078, is a plasmid comprising in the 5′ to 3′ direction: [L-ITR]-[(LSP:Liver Specific Promoter)]-[5′UTR]-[1-23aa GAA]-[201Ig]-[GAA polypeptide starting at amino acid 57 of SEQ ID NO:1]-[3′UTR]-[hGH polyA signal and Terminator]-[RNA polymerase II transcriptional pause signal]-[R-ITR]. See, e.g., SEQ ID NO: 483.
[0195] pP079, is a plasmid comprising in the 5′ to 3′ direction: [L-ITR]-[(LSP:Liver Specific Promoter)]-[5′UTR]-[1-2aa GAA]-[IL-2 signal sequence (Met1 removed)]-[GAA polypeptide starting at amino acid 57 of SEQ ID NO:1]-[3′UTR]-[hGH polyA signal and Terminator]-[RNA polymerase II transcriptional pause signal]-[R-ITR]. See, e.g., SEQ ID NO: 484.
[0196] pP080, is a plasmid comprising in the 5′ to 3′ direction: [L-ITR]-[(LSP:Liver Specific Promoter)]-[5′UTR]-[1-2aa GAA]-[201Ig(Met1 removed)]-[GAA polypeptide starting at amino acid 57 of SEQ ID NO:1]-[3′UTR]-[hGH polyA signal and Terminator]-[RNA polymerase II transcriptional pause signal]-[R-ITR]. See, e.g., SEQ ID NO: 485.
[0197] pP081, is a plasmid comprising in the 5′ to 3′ direction: [L-ITR]-[(LSP:Liver Specific Promoter)]-[5′UTR]-[1-2aa GAA]-[IL-2 signal sequence(Met1 removed)]-[GAA polypeptide starting at amino acid 57 of SEQ ID NO:1]-[3′UTR]-[hGH polyA signal and Terminator]-[RNA polymerase II transcriptional pause signal]-[R-ITR]. See, e.g., SEQ ID NO: 486.
[0198] pP082, is a plasmid comprising in the 5′ to 3′ direction: [L-ITR]-[(LSP:Liver Specific Promoter)]-[5′UTR]-[1-2aa GAA]-[201Ig(Met1 removed)]-[GAA polypeptide starting at amino acid 57 of SEQ ID NO:1]-[3′UTR]-[hGH polyA signal and Terminator]-[RNA polymerase II transcriptional pause signal]-[R-ITR]. See, e.g., SEQ ID NO: 487.
[0199] pP083, is a plasmid comprising in the 5′ to 3′ direction: [L-ITR]-[(LSP:Liver Specific Promoter)]-[5′UTR]-[1-4aa GAA]-[IL-2 signal sequence(Met1 removed)]-[GAA polypeptide starting at amino acid 57 of SEQ ID NO:1]-[3′UTR]-[hGH polyA signal and Terminator]-[RNA polymerase II transcriptional pause signal]-[R-ITR]. See, e.g., SEQ ID NO: 488.
[0200] pP084, is a plasmid comprising in the 5′ to 3′ direction: [L-ITR]-[(LSP:Liver Specific Promoter)]-[5′UTR]-[1-4aa GAA]-[201Ig(Met1 removed)]-[GAA polypeptide starting at amino acid 57 of SEQ ID No:1]-[3′UTR]-[hGH polyA signal and Terminator]-[RNA polymerase II transcriptional pause signal]-[R-ITR]. See, e.g., SEQ ID NO: 489.
[0201] pP085, is a plasmid comprising in the 5′ to 3′ direction: [L-ITR]-[(LSP:Liver Specific Promoter)]-[5′UTR]-[1-4aa GAA]-[IL-2 signal sequence(Met1 removed)]-[GAA polypeptide starting at amino acid 57 of SEQ ID NO:1]-[3′UTR]-[hGH polyA signal and Terminator]-[RNA polymerase II transcriptional pause signal]-[R-ITR]. See, e.g., SEQ ID NO: 490.
[0202] pP086, is a plasmid comprising in the 5′ to 3′ direction: [L-ITR]-[(LSP:Liver Specific Promoter)]-[5′UTR]-[1-4aa GAA]-[201Ig(Met1 removed)]-[GAA polypeptide starting at amino acid 57 of SEQ ID No:1]-[3′UTR]-[hGH polyA signal and Terminator]-[RNA polymerase II transcriptional pause signal]-[R-ITR]. See, e.g., SEQ ID NO: 491.
[0203] pP087, is a plasmid comprising in the 5′ to 3′ direction: [L-ITR]-[(LSP:Liver Specific Promoter)]-[5′UTR]-[1-10aa GAA]-[IL-2 signal sequence(Met1 removed)]-[GAA polypeptide starting at amino acid 57 of SEQ ID NO:1]-[3′UTR]-[hGH polyA signal and Terminator]-[RNA polymerase II transcriptional pause signal]-[R-ITR]. See, e.g., SEQ ID NO: 492.
[0204] pP088, is a plasmid comprising in the 5′ to 3′ direction: [L-ITR]-[(LSP:Liver Specific Promoter)]-[5′UTR]-[1-10aa GAA]-[201Ig(Met1 removed)]-[GAA polypeptide starting at amino acid 57 of SEQ ID NO:1]-[3′UTR]-[hGH polyA signal and Terminator]-[RNA polymerase II transcriptional pause signal]-[R-ITR]. See, e.g., SEQ ID NO: 493.
[0205] pP089, is a plasmid comprising in the 5′ to 3′ direction: [L-ITR]-[(LSP:Liver Specific Promoter)]-[5′UTR]-[1-10aa GAA]-[IL-2 signal sequence(Met1 removed)]-[GAA polypeptide starting at amino acid 57 of SEQ ID NO:1]-[3′UTR]-[hGH polyA signal and Terminator]-[RNA polymerase II transcriptional pause signal]-[R-ITR]. See, e.g., SEQ ID NO: 494.
[0206] pP090, is a plasmid comprising in the 5′ to 3′ direction: [L-ITR]-[(LSP:Liver Specific Promoter)]-[5′UTR]-[1-10aa GAA]-[201Ig(Met1 removed)]-[GAA polypeptide starting at amino acid 57 of SEQ ID NO;1]-[3′UTR]-[hGH polyA signal and Terminator]-[RNA polymerase II transcriptional pause signal]-[R-ITR]. See, e.g., SEQ ID NO: 495.
[0207] pP091, is a plasmid comprising in the 5′ to 3′ direction: [L-ITR]-[(LSP:Liver Specific Promoter)]-[5′UTR]-[1-27aa GAA]-[IL-2 signal sequence(Met1 removed)]-[GAA polypeptide starting at amino acid 57 of SEQ ID NO:1]-[3′UTR]-[hGH polyA signal and Terminator]-[RNA polymerase II transcriptional pause signal]-[R-ITR]. See, e.g., SEQ ID NO: 496.
[0208] pP092, is a plasmid comprising in the 5′ to 3′ direction: [L-ITR]-[(LSP:Liver Specific Promoter)]-[5′UTR]-[1-27aa GAA]-[201Ig(Met1 removed)]-[GAA polypeptide starting at amino acid 57 of SEQ ID NO:1]-[3′UTR]-[hGH polyA signal and Terminator]-[RNA polymerase II transcriptional pause signal]-[R-ITR]. See, e.g., SEQ ID NO: 497.
[0209] pP093, is a plasmid comprising in the 5′ to 3′ direction: [L-ITR]-[(LSP:Liver Specific Promoter)]-[5′UTR]-[1-27aa GAA]-[IL-2 signal sequence(Met1 removed)]-[GAA polypeptide starting at amino acid 57 of SEQ ID NO:1]-[3′UTR]-[hGH polyA signal and Terminator]-[RNA polymerase II transcriptional pause signal]-[ITR-neighborhood]-[R-ITR]. See, e.g., SEQ ID NO: 498.
[0210] pP094, is a plasmid comprising in the 5′ to 3′ direction: [L-ITR]-[(LSP:Liver Specific Promoter)]-[5′UTR]-[1-27aa GAA]-[201Ig(Met1 removed)]-[GAA polypeptide starting at amino acid 57 of SEQ ID NO:1]-[3′UTR]-[hGH polyA signal and Terminator]-[RNA polymerase II transcriptional pause signal]-[R-ITR]. See, e.g., SEQ ID NO: 499.
[0211] pP098, is a plasmid comprising in the 5′ to 3′ direction: [L-ITR]-[(LSP:Liver Specific Promoter)]-[5′UTR]-[1-24aa GAA]-[GAA polypeptide starting at amino acid 57 of SEQ ID NO:1]-[3′UTR]-[hGH polyA signal and Terminator]-[RNA polymerase II transcriptional pause signal]-[R-ITR]. See, e.g., SEQ ID NO: 500.
[0212] pP099, is a plasmid comprising in the 5′ to 3′ direction: [L-ITR]-[(LSP:Liver Specific Promoter)]-[5′UTR]-[1-24aa GAA]-[GAA polypeptide starting at amino acid 57 of SEQ ID NO:1]-[3′UTR]-[hGH polyA signal and Terminator]-[RNA polymerase II transcriptional pause signal]-[R-ITR]. See, e.g., SEQ ID NO: 501.
[0213] pP110, is a plasmid comprising in the 5′ to 3′ direction: [ITR2]-[LSP]-[1-28aa GAA]-[GAA polypeptide starting at amino acid 57 of SEQ ID NO:1]-[3′UTR]-[hGH polyA]-[ITR2]. See, e.g., SEQ ID NO: 502.
[0214] pP111, is a plasmid comprising in the 5′ to 3′ direction: [ITR2]-[LSP]-[1-24aa GAA]-[GAA polypeptide starting at amino acid 57 of SEQ ID NO:1]-[3′UTR]-[hGH polyA]-[ITR2]. See, e.g., SEQ ID NO: 503.
[0215] pP112, is a plasmid comprising in the 5′ to 3′ direction: [ITR2]-[LSP]-[1-27aa GAA]-[201Ip(Met1 removed)]-[GAA polypeptide starting at amino acid 57 of SEQ ID NO:1]-[3′UTR]-[hGH polyA]-[ITR2]. See, e.g., SEQ ID NO: 504.
[0216] pP113, is a plasmid comprising in the 5′ to 3′ direction: [ITR2]-[LSP]-[1-24aa GAA]-[201lp]-[GAA polypeptide starting at amino acid 57 of SEQ ID NO:1]-[3′UTR]-[hGH polyA]-[ITR2]. See, e.g., SEQ ID NO: 505.
[0217] pP114, is a plasmid comprising in the 5′ to 3′ direction: [ITR2]-[LSP]-[1-2aa GAA]-[IL-2 signal sequence (Met1 removed)]-[GAA polypeptide starting at amino acid 57 of SEQ ID NO:1]-[3′UTR]-[hGH polyA]-[ITR2]. See, e.g., SEQ ID NO: 506.
[0218] pP150, is a plasmid comprising in the 5′ to 3′ direction: [ITR2]-[LSP]-[1-24aa GAA]-[201Ip]-[GAA polypeptide starting at amino acid 57 of SEQ ID NO:1]-[3′UTR]-[hGH polyA]-[ITR2]. See, e.g., SEQ ID NO: 507.
[0219] pP151, is a plasmid comprising in the 5′ to 3′ direction: [ITR2]-[LSP]-[5′UTR]-[1-24aa GAA]-[201Ip]-[GAA polypeptide starting at amino acid 57 of SEQ ID NO:1]-[3′UTR]-[hGH polyA]-[ITR2]. See, e.g., SEQ ID NO: 508.
[0220] pP152, is a plasmid comprising in the 5′ to 3′ direction: [ITR2]-[LSP]-[1-24aa GAA]-[201Ip]-[GAA polypeptide starting at amino acid 57 of SEQ ID NO:1]-[3′UTR]-[hGH polyA]-[ITR2]. See, e.g., SEQ ID NO: 509.
[0221] pP153, is a plasmid comprising in the 5′ to 3′ direction: [ITR2]-[LSP]-[5′UTR]-[1-24aa GAA]-[201Ip]-[GAA polypeptide starting at amino acid 57 of SEQ ID NO:1]-[3′UTR]-[hGH polyA]-[ITR2]. See, e.g., SEQ ID NO: 510.
[0222] pP155, is a plasmid comprising in the 5′ to 3′ direction: [L-ITR]-[fragment of P5]-[LSP]-[1-24aa GAA]-[201Ip]-[GAA polypeptide starting at amino acid 57 of Seq ID NO;1]-[3′UTR]-[hGH polyA]-[R-ITR]. See, e.g., SEQ ID NO: 511.
[0223] pP157, is a plasmid comprising in the 5′ to 3′ direction: [L-ITR]-[fragment of P5]-[LSP]-[1-28aa GAA from ACTUS]-[GAA polypeptide starting at amino acid 57 of SEQ ID NO:1]-[3′UTR]-[hGH polyA]-[R-ITR]. See, e.g., SEQ ID NO: 512.

[0224] In some embodiments, the exemplary constructs have codon optimized GAA, including codon optimized GAA signal peptide, or portion thereof, e.g., the GAA and/or GAA signal peptide is encoded by seq 100 (SEQ ID NO:3), or seq3 (SEQ ID NO:4), or a fragment thereof. In some embodiments of the invention, the GAA and/or GAA signal peptides, or portion thereof in the exemplary constructs are not codon optimized, e.g., the GAA and/or GAA signal peptide is encoded by SEQ ID NO:2 or fragment thereof.

[0225] In some embodiments, the exemplary constructs described herein can be in a plasmid DNA backbone, or in a close ended linear duplexed DNA backbone or a precursor plasmid of close ended linear duplexed DNA backbone.

[0226] In some embodiments, the exemplary constructs described herein comprise 5′UTRs as described in the instant application including but not limited to SEQ ID NO:40 or SEQ ID NO:41.

[0227] In some embodiments, the nucleic acid encoding GAA the invention including but not limited to exemplary constructs, have 130 bp ITRs. In some embodiments of the invention, the nucleic acid encoding GAA of the invention including but not limited to exemplary constructs, have 145 bp ITRs.

[0228] In some embodiments, exemplary nucleic acid sequences in the rAAV vector or rAAV genome as disclosed herein are shown in Table 10.

[0229] Table 10: Exemplary constructs encoding in a 5′ to 3′ direction a GAA-signal peptide, or portion thereof, a heterologous signal peptide and a GAA polypeptide (see, e.g., FIG. 29). In Table 10, a GAA polypeptide that begins at amino acid 57 of SEQ ID NO:1 is shown for exemplary purposes, however, any GAA polypeptide is envisoned, including any N-terminal truncation disclosed in Table 1 herein, as well as wild type GAA polypeptide, codon-optimized GAA polypeptides, ACTUS-101 GAA polypeptide, and N-terminal truncations thereof. (Hetero-SP, or SP refers to a heterologous signal peptide as disclosed herein, GAA-SP refers to the endogenous (cognate) signal peptide of GAA of SEQ ID NO: 59, or a portion thereof).

| | | | Amino acid | |
|---|---|---|---|---|
| Name | Description | Construct Summary | construct | Nucleic acid construct |
| P026 | Delta 2-56 | [1aa GAA-SP]- | [1aa of SEQ ID NO: | [1-3bp of SEQ ID NO: |
| | | [hetro-SP]-[delta1-56 | 59]-[hetro-SP]-[57- | 53]-[SP]-[169-2859bp |
| | | GAA/M5] | 952aa of SEQ ID | of SEQ ID NO: 3] |
| | | | NO: 1] | |
| P065 | Delta 29-56 | [1-27 aa GAA-SP]- | [1-27aa of SEQ ID | [1-81bp of SEQ ID |
| | | [delta 29-56 GAA] | NO: 59]-[28aa of | NO: 53]-[82-84 of |
| | | | SEQ ID NO: 1][57- | SEQ ID NO: 3][169- |
| | | | 952aa of SEQ ID | 2859bp of SEQ ID |
| | | | NO: 1] | NO: 3] |
| P067 | Retained 28-31 | [1-27 aa GAA-SP]- | [1-27aa of SEQ ID | [1-81bp of SEQ ID |
| | [28-31aa GAA]- | [28-31aa of GAA]- | NO: 59]-[28-31aa of | NO: 53]-[82-94bp of |
| | [SP]-[delta32-56]) | [hetero-SP]--[delta32- | SEQ ID NO: 1]- | SEQ ID NO: 3]-[SP]- |
| | | 56 GAA] | [hetro-SP]-[57- | [169-2859bp of SEQ |
| | | | 952aa of SEQ ID | ID NO: 3] |
| | | | NO: 1] | |
| P072 | Retained 1-24 [1- | [1-24 aa GAA-SP]- | [1-24aa of SEQ ID | [1-72bp of SEQ ID |
| | 24aa GAA-SP]- | [hetero-SP]--[delta25- | NO: 59]-[hetro-SP]- | NO: 53]-[SP]-[169- |
| | [SP]-[delta25-56]) | 56 GAA] | [57-952aa of SEQ | 2859bp of SEQ ID |
| | | | ID NO: 1] | NO: 3] |
| P075 | Retained 1-23 [1- | [1-23 aa GAA-SP]- | [1-23aa of SEQ ID | [1-69bp of SEQ ID |
| | 23aa GAA-SP]- | [hetero-SP]--[delta24- | NO: 59]-[hetro-SP]- | NO: 53]-[SP]-[169- |
| | [SP]-[delta24-56]) | 56 GAA] | [57-952aa of SEQ | 2859bp of SEQ ID |
| | | | ID NO: 1] | NO: 3] |
| P092 | Retained 1-27 [1- | [1-27 aa GAA-SP]- | [1-27aa of SEQ ID | 1-81bp of SEQ ID NO: |
| | 27aa GAA- | [28aa of GAA]- | NO: 59]-[hetro-SP]- | 53]-[82-84 of SEQ ID |
| | SP][28aa GAA]- | [hetero-SP]--[delta | [57-952aa of SEQ | NO: 3]-[SP]-[169- |
| | [SP]-[delta29-56]) | 29-56 GAA] | ID NO: 1] | 2859bp of SEQ ID |
| | | | | NO: 3] |

[0230] In one embodiment, the constructs described in Table 10 achieve the titers described in Table 11 following in vivo administration at 4 weeks-post administration.

TABLE 11
Summary of in vivo results 4 weeks post administration.

| | Serum | Serum | Heart | Heart | Liver |
|---|---|---|---|---|---|
| Group | GAA | 4MU | 4MU | glycogen | retention |
| GAA KO | 3.4e4 | 2.6e3 | 59.3 | 38.0 | 2.1e4 |
| 002/M4 | 2.0e5 | 4.5e3 | 65.0 | 30.7 | 2.8e6 |
| 026/M5 | 6.6e6 | 2.7e4 | 366.4 | 21.9 | 5.5e5 |
| 065 | 6.6e6 | 1.5e4 | 343.8 | 26.1 | 2.2e5 |
| 067 | 5.9e6 | 1.9e4 | 294.9 | 20.5 | 1.1e6 |
| 072 | 6.6e6 | 3.9e4 | 512.9 | 18.1 | 6.4e5 |
| 075 | 5.8e6 | 2.6e4 | 626.6 | 27.6 | 4.6e5 |
| 092 | 4.2e5 | 6.6e3 | 193.2 | 17.3 | 4.0e4 |
| WT mice | ND | ND | 482.1 | 20.6 | ND |

[0231] In Table 11, “Serum GAA” describes the level of GAA expression found in the serum of the injected mice 4 weeks post administration; “Serum 4MU” describes the level of GAA activity found in the serum of the injected mice 4 weeks post administration; “Heart 4MU” describes the level of GAA activity found in the heart of the injected mice 4 weeks post administration; “Heart glycogen” describes the level of glucose found in the heart of the injected mice 4 weeks post administration; and “Liver retention” describes the level of GAA expression found in the liver of the injected mice 4 weeks post administration.

[0232] In general, the GAA-signal peptide and/or heterologous signal peptide will be at the amino-terminus (N-terminus) of the GAA polypeptide (i.e., the nucleic acid segment encoding the signal peptide is 5′ to the heterologous nucleic acid encoding the GAA peptide in the rAAV vector or rAAV genome as disclosed herein). Alternatively, the signal peptide may be at the carboxyl-terminus or embedded within the GAA polypeptide, as long as the signal peptide is operatively associated therewith and directs secretion of the GAA polypeptide or GAA fusion polypeptide of interest (either with or without cleavage of the signal peptide from the GAA polypeptide) from the cell.

[0233] The signal peptide is operatively associated with the GAA polypeptide, including N-terminal truncated GAA polypeptides as disclosed in Table 1 herein, is targeted to the secretory pathway. Alternatively stated, the signal peptide is operatively associated with the GAA polypeptide such that the GAA-polypeptide is secreted from the cell at a higher level (i.e., a greater quantity) than in the absence of the secretory signal peptide. In general, typically at least about 20%, 30%, 40%, 50%, 70%, 80%, 85%, 90%, 95% or more of the GAA-polypeptide is secreted from the cell when a signal peptide is attached as compared to in the absence of the attachment of a secretory signal peptide. In other embodiments, essentially all of the detectable polypeptide (alone and/or in the form of the fusion polypeptide) is secreted from the cell.

[0234] By the phrase “secreted from the cell”, the polypeptide may be secreted into any compartment (e.g., fluid or space) outside of the cell including but not limited to: the interstitial space, blood, lymph, cerebrospinal fluid, kidney tubules, airway passages (e.g., alveoli, bronchioles, bronchia, nasal passages, etc.), the gastrointestinal tract (e.g., esophagus, stomach, small intestine, colon, etc.), vitreous fluid in the eye, and the cochlear endolymph, and the like.

[0235] Accordingly, in some embodiments, a AAV expressing GAA useful in the methods to treat Pompe Disease as disclosed herein comprises a 5′ ITR and 3′ ITR sequence, and located between the 5′ITR and the 3′ ITR, a liver specific promoter operatively linked to a heterologous nucleic acid encoding a secretory peptide and nucleic acid encoding an alpha-glucosidase (GAA) polypeptide (i.e., the heterologous nucleic acid encodes a GAA polypeptide or N-terminal GAA polypeptide comprising a signal peptide-GAA polypeptide).

[0236] In alternative embodiments, a AAV expressing GAA useful in the methods to treat Pompe Disease as disclosed herein comprises a 5′ ITR and 3′ ITR sequence, and located between the 5′ITR and the 3′ ITR, a promoter operatively linked to a heterologous nucleic acid encoding a secretory peptide and nucleic acid encoding an alpha-glucosidase (GAA) polypeptide.

[0237] Generally, secretory signal peptides are cleaved within the endoplasmic reticulum and, in some embodiments, the signal peptide is cleaved from the GAA polypeptide prior to secretion. It is not necessary, however, that the signal peptide is cleaved as long as secretion of the GAA polypeptide from the cell is enhanced and the GAA polypeptide is functional. Thus, in some embodiments, the signal peptide is partially or entirely retained.

[0238] In some embodiments, the rAAV genome, or an isolated nucleic acid as disclosed herein comprises a nucleic acid encoding a chimeric polypeptide comprising a GAA polypeptide operably linked to a secretory signal peptide, and the chimeric polypeptide is expressed and produced from a cell transduced with the rAAV vector and the GAA polypeptide is secreted from the cell. The GAA polypeptide can be secreted after cleavage of all or part of the secretory signal peptide. Alternatively, the GAA polypeptide can retain the signal peptide (i.e., the signal peptide is not cleaved). Thus, in this context, the “GAA polypeptide” can be a chimeric polypeptide comprising the secretory peptide.

[0239] Other signal peptide as encompassed for use in the methods and compositions as disclosed herein. For example, numerous secreted proteins and sequences that direct secretion from the cell are known in the art, are disclosed in U.S. Pat. No. 9,873,868, which is incorporated herein in its entirety by reference. Exemplary secreted proteins (and their secretory signals) include but are not limited to: erythropoietin, coagulation Factor IX, cystatin, lactotransferrin, plasma protease C1 inhibitor, apolipoproteins (e.g., APO A, C, E), MCP-1, α-2-HS-glycoprotein, α-1-microgolubilin, complement (e.g., C1Q, C3), vitronectin, lymphotoxin-α, azurocidin, VIP, metalloproteinase inhibitor 2, glypican-1, pancreatic hormone, clusterin, hepatocyte growth factor, insulin, α-1-antichymotrypsin, growth hormone, type IV collagenase, guanylin, properdin, proenkephalin A, inhibin β (e.g., A chain), prealbumin, angiocenin, lutropin (e.g., β chain), insulin-like growth factor binding protein 1 and 2, proactivator polypeptide, fibrinogen (e.g., β chain), gastric triacylglycerol lipase, midkine, neutrophil defensins 1, 2, and 3, α-1-antitrypsin, matrix gla-protein, α-tryptase, bile-salt-activated lipase, chymotrypsinogen B, elastin, IG lambda chain V region, platelet factor 4 variant, chromogranin A, WNT-1 proto-oncogene protein, oncostatin M, β-neoendorphin-dynorphin, von Willebrand factor, plasma serine protease inhibitor, serum amyloid A protein, nidogen, fibronectin, rennin, osteonectin, histatin 3, phospholipase A2, cartilage matrix Protein, GM-CSF, matrilysin, neuroendocrine protein 7B2, placental protein 11, gelsolin, M-CSF, transcobalamin I, lactase-phlorizin hydrolase, elastase 2B, pepsinogen A, MIP 1-β, prolactin, trypsinogen II, gastrin-releasing peptide II, atrial natriuretic factor, secreted alkaline phosphatase, pancreatic α-amylase, secretogranin I, β-casein, serotransferrin, tissue factor pathway inhibitor, follitropin β-chain, coagulation factor XII, growth hormone-releasing factor, prostate seminal plasma protein, interleukins (e.g., 2, 3, 4, 5, 9, 11), inhibin (e.g., alpha chain), angiotensinogen, thyroglobulin, IG heavy or light chains, plasminogen activator inhibitor-1, lysozyme C, plasminogen activator, antileukoproteinase 1, statherin, fibulin-1, isoform B, uromodulin, thyroxine-binding globulin, axonin-1, endometrial α-2 globulin, interferon (e.g., alpha, beta, gamma), β-2-microglobulin, procholecystokinin, progastricsin, prostatic acid phosphatase, bone sialoprotein II, colipase, Alzheimer's amyloid A4 protein, PDGF (e.g., A or B chain), coagulation factor V, triacylglycerol lipase, haptoglobuin-2, corticosteroid-binding globulin, triacylglycerol lipase, prorelaxin H2, follistatin 1 and 2, platelet glycoprotein IX, GCSF, VEGF, heparin cofactor II, antithrombin-III, leukemia inhibitory factor, interstitial collagenase, pleiotrophin, small inducible cytokine A1, melanin-concentrating hormone, angiotensin-converting enzyme, pancreatic trypsin inhibitor, coagulation factor VIII, α-fetoprotein, α-lactalbumin, senogelin II, kappa casein, glucagon, thyrotropin beta chain, transcobalamin II, thrombospondin 1, parathyroid hormone, vasopressin copeptin, tissue factor, motilin, MPIF-1, kininogen, neuroendocrine convertase 2, stem cell factor procollagen al chain, plasma kallikrein keratinocyte growth factor, as well as any other secreted hormone, growth factor, cytokine, enzyme, coagulation factor, milk protein, immunoglobulin chain, and the like.

[0240] In one embodiment, the secretory signal peptide is not a secretory signal peptide of α-1-antitrypsin (e.g., amino acids 1-24 of α-1-antitrypsin), chymotrypsinogen B2 (e.g., amino acids 1-20 of chymotrypsinogen B2), iduronate-2-sulphatase (e.g., amino acids 1-25 of iduronate-2-sulphatase), or protease C1 inhibitor (e.g., amino acids 1-23 of protease CI inhibitor).

[0241] In some embodiments, other secretory signal peptides encoded by the rAAV genome and in the rAAV vector as disclosed herein can be selected from, but are not limited to, the signal peptide sequences from prepro-cathepsin L (e.g., GenBank Accession Nos. KHRTL, NP_037288; NP_034114, AAB81616, AAA39984, P07154, CAA68691; the disclosures of which are incorporated by reference in their entireties herein) and prepro-alpha 2 type collagen (e.g., GenBank Accession Nos. CAA98969, CAA26320, CGHU2S, NP_000080, BAA25383, P08123; the disclosures of which are incorporated by reference in their entireties herein) as well as allelic variations, modifications and functional fragments thereof (as discussed above with respect to the fibronectin signal peptide sequence). Exemplary signal peptide sequences include for preprocathepsin L (Rattus norvegicus, MTPLLLLAVLCLGTALA [SEQ ID NO: 77]; Accession No. CAA68691) and for prepro-alpha 2 type collagen (Homo sapiens, MLSFVDTRTLLLLAVTLCLATC [SEQ ID NO: 78]; Accession No. CAA98969). Also encompassed are longer amino acid sequences comprising the full-length signal peptide sequence from preprocathepsin L and prepro-alpha 2 type collagen or functional fragments thereof (as discussed above with respect to the fibronectin signal peptide sequence).

[0242] In some embodiments, the signal peptide is derived in part or in whole from a secreted polypeptide that is produced by liver cells. In some embodiments, a signal peptide can further be in whole or in part synthetic or artificial. Synthetic or artificial secretory signal peptides are known in the art, see e.g., Barash et al., “Human signal peptide description by hidden Markov model and generation of a strong artificial signal peptide for secreted protein expression,” Biochem. Biophys. Res. Comm. 294:835-42 (2002); the disclosure of which is incorporated herein in its entirety. In particular embodiments, the signal peptide comprises, consists essentially of, or consists of the artificial secretory signal: MWWRLWWLLLLLLLLWPMVWA (SEQ ID NO: 65) or variations thereof having 1, 2, 3, 4, or 5 amino acid substitutions (optionally, conservative amino acid substitutions, conservative amino acid substitutions are known in the art).

[0243] Exemplary signal peptides for use in the methods and compositions as disclosed herein can be selected from any signal peptide disclosed in Table 2, or portions thereof or functional variants thereof. Exemplary signal peptides are Fibronectin (FN1), or AAT. In some embodiments of the methods and compositions disclosed herein, the rAAV vector composition comprises the nucleic acid encoding a secretory signal peptide, e.g., encoding a signal peptide selected from an AAT signal peptide (e.g., SEQ ID NO: 67), a fibronectin signal peptide (FN1) (e.g., SEQ ID NO: 68-71), an hIGF2 signal peptide (e.g., SEQ ID NO: 72) or an active fragment thereof having secretory signal activity, e.g., a nucleic acid encoding an amino acid sequence that has at least about 75%, or 80%, or 85%, or 90%, or 95%, or 98%, or 99% sequence identity to SEQ ID NOs: 67-72.

[0244] In some embodiments of the methods and compositions as disclosed herein, the nucleic acid encoding the signal peptide is selected from any of SEQ ID NO: 54-58, 67, 72-76 and 72, or a nucleic acid sequence at least about 75%, or 80%, or 85%, or 90%, or 95%, or 98%, or 99% sequence identity to any of SEQ ID NOs: 54-58, 67, 72-76 and 72.

### Fibronectin Secretory Signal Peptide:

[0245] In some embodiments, the signal peptide is a fibronectin secretory signal peptide or portions thereof or functional variants thereof, which term includes modifications of naturally occurring sequences (as described in more detail below).

[0246] In some embodiments, the signal peptide is a fibronectin signal peptide, e.g., a signal sequence of human fibronectin or a signal sequence from rat fibronectin. Fibronectin (FN1) signal sequences and modified FN1 signal peptides encompassed for use in the rAAV genome and rAAV vectors described herein are disclosed in U.S. Pat. No. 7,071,172, which is incorporated herein in its entirety by reference, and in Table 3 of provisional application 62/937,556, filed on Nov. 19, 2019 or International Application WO2021102107, which is incorporated herein in its reference. Examples of exemplary fibronectin signal peptide sequences include, but are not limited to those listed in Table 1 of U.S. Pat. No. 7,071,172, which is incorporated herein in its entirety by reference.

[0247] Table 2: Exemplary Fibronectin (FN1) secretory signal peptides

| Species | Signal peptide sequence | Nucleic acid sequence |
|---|---|---|
| H. Sapiens | MLRGPGPGLLLLAVQCLGTAV | ATG CTT AGG GGT CCG GGG CCC GGG CTG |
| | PSTGA (SEQ ID NO: 70) | CTG CTG CTG GCC GTC CAG TGC CTG GGG |
| | | ACA GCG GTG CCC TCC ACG GGA GCC |
| | | (SEQ ID NO: 75) |
| R. | MLRGPGPGRLLLLAVLCLGTSV | 5′- |
| Norvegicus | RCTETGKSKR (SEQ ID NO: 68) | ATGCTCAGGGGTCCGGGACCCGGGCGGCT |
| | | GCTGCTGCTAGCAGTCCTGTGCCTGGGGAC |
| | | ATCGGTGCGCTGCACCGAAACCGGGAAGA |
| | | GCAAGAGG-3 (SEQ ID NO: 73) |
| R. | MLRGPGPGRLLLLAVLCLGTSV | 5′-ATG CTC AGG GGT CCG GGA CCC GGG |
| Norvegicus | RCTETGKSKR ↑ LALQIV | CGG CTG CTG CTG CTA GCA GTC CTG TGC |
| | (SEQ ID NO: 69) | CTG GGG ACA TCG GTG CGC TGC |
| | | ACC GAA ACC GGG AAG AGC AAG AGG ↑ |
| | | CAG GCT CAG CAA ATC GTG-3′. (SEQ ID |
| | | NO: 74) (↑ denotes the cleavage site) |
| X. laevis | MRRGALTGLLLVLCLSVVLRA | ATG CGC CGG GGG GCC CTG ACC GGG CTG |
| | APSATSKKRR (SEQ ID NO: 71) | CTC CTG GTC CTG TGC CTG AGT GTT GTG |
| | | CTA CGT GCA GCC CCC TCT GCA ACA AGC |
| | | AAG AAG CGC AGG (SEQ ID NO: 76) |

### Peptidase Cleavage Sites

[0248] In some embodiments, one or more exogenous peptidase cleavage site may be inserted into the signal peptide-GAA polypeptide, e.g., between the signal peptide and the GAA polypeptide. In particular embodiments, an autoprotease (e.g., the foot and mouth disease virus 2A autoprotease) is inserted between the signal peptide and the GAA polypeptide. In other embodiments, a protease recognition site that can be controlled by addition of exogenous protease is employed (e.g., Lys-Arg recognition site for trypsin, the Lys-Arg recognition site of the Aspergillus KEX2-like protease, the recognition site for a metalloprotease, the recognition site for a serine protease, and the like). Modification of the GAA polypeptide to delete or inactivate native protease sites is encompassed herein and disclosed in U.S. Provisional Application 62,937,556, filed on Nov. 19, 2019 and International Application WO2021102107, which is incorporated herein in its reference.

### D. Spacer and Fusion Junction of the GAA Polypeptide

[0249] Where GAA is expressed with a heterologous signal peptide, the signal peptide can be fused directly to the GAA polypeptide or can be separated from the GAA polypeptide by a linker. An amino acid linker (also referred to herein as a “spacer”) incorporates one or more amino acids other than that appearing at that position in the natural protein. Spacers can be generally designed to be flexible or to interpose a structure, such as an a-helix, between the two protein moieties.

[0250] Accordingly, in some embodiments of the methods and compositions disclosed herein, a recombinant AAV vector comprises a heterologous nucleic acid sequence encoding an GAA polypeptide, wherein the GAA protein further comprises a spacer comprising a nucleotide sequence of at least 1 amino acid in length, which is located N-terminal to the GAA polypeptide.

[0251] In one embodiment, the spacer at least 50% identical to the sequence GGGTVGDDDDK.

[0252] In some embodiments, a spacer or linker can be relatively short, e.g., at least 1, 2, 3, 4 or 5 amino acids, or such as the sequence Gly-Ala-Pro or Gly-Gly-Gly-Gly-Gly-Pro, or can be longer, such as, for example, 5-10 amino acids in length or 10-25 amino acids in length. For example, flexible repeating linkers of 3-4 copies of the sequence (e.g., GGGGS) and a-helical repeating linkers of 2-5 copies of the sequence (e.g., EAAAK) have been described (Arai et al. (2004) Proteins: Structure, Function and Bioinformatics 57:829-838). In some embodiments, a linker comprising GGGTVGDDDDK is also encompassed for use. Linkers incorporating an a-helical portion of a human serum protein can be used to minimize immunogenicity of the linker region. In some embodiments, the spacer is encoded by nucleic acids GGCGCGCCG which encodes the amino acid spacer comprising amino acids GAP or Gly-Ala-Pro.

[0253] The site of a fusion junction in the GAA polypeptide to fuse with either the signal peptide should be selected with care to promote proper folding and activity of each polypeptide in the fusion protein and to prevent premature separation of a signal peptide from a GAA polypeptide.

[0254] In some embodiments, a spacer has a helical structure. In another specific embodiment, a spacer is at least 50% identical to the sequence GGGTVGDDDDK.

[0255] In some embodiments, a signal peptide can be fused, directly or by a spacer, to amino acids of the GAA polypeptide as disclosed in Table 1 herein, permitting expression of the GAA polypeptide or N-terminal truncated GAA polypeptiden, and proper secretion of the GAA polypeptide as described herein in the Examples.

[0256] In order to facilitate folding of the signal peptide, GAA amino acid residues adjacent to the fusion junction can be modified. For example, since it is possible that GAA cysteine residues may interfere with proper folding of the signal peptide, the terminal GAA cysteine 952 can be deleted or substituted with serine to accommodate a C-terminal signal peptide. The signal peptide can also be fused immediately preceding the final Cys952. The penultimate cys938 can be changed to proline in conjunction with a mutation of the final Cys952 to serine.

### F. Liver Specific Promoters (LSP)

[0257] In some embodiments, to achieve appropriate levels of GAA expression, the rAAV genotype comprises a liver specific promoter (LSP). A LSP enables expression of the operatively linked gene in the liver, and can in some embodiments, be and inducible LSP. In an embodiment, a LSP is located upstream 5′ and is operatively linked to the heterologous nucleic acid sequence encoding the GAA protein.

[0258] Exemplary liver-specific promoters useful in the AAV to treat Pompe according to the method disclosed herien are disclosed in International WO2020102645 and WO2021102107, which are incorporated herein in their entirety by reference.

[0259] In some embodiments, encompassed herein are any liver-specific promoters disclosed WO2020102645 and WO2021102107, where the LSP has been improved. For example, a liver specific promoter useful in the rAAV vectors as disclosed herein is any LSP disclosed International WO2020102645 and WO2021102107 which has been modified to replace the the sequence of SEQ ID NO: 450 (corresponding to as SEQ ID NO: 126 in WO2021102107 or referred to as CRE0052 or LVR_CRE_0052_G6PC sequence) in any of the LSP sequences in WO2021102107 with a sequence selected from SEQ ID NO: 40 or 41, or a sequence having at least 85%, 90%, 95%, 96%, 97%, 98% or 99% nucleotide sequence identity thereto. Using SP131A1 (or LVR131_A1) promoter as an exemplary promoter, which is disclosed as SEQ ID NO: 94 in WO2021102107, in the current application the promoter has been modified to replace SEQ ID NO 450 (corresponding to SEQ ID NO: 126 in WO2021102107) with SEQ ID NO: 40 or 41, or a sequence having at least 85%, 90%, 95%, 96%, 97%, 98% or 99% nucleotide sequence identity thereto. Any promoter disclosed in WO2021102107 is encompased for use herein, wherein if the promoter comprises SEQ ID NO 450 (corresponding to SEQ ID NO: 126 in WO2021102107), it can be replaced with SEQ ID NO: 40 or 41, or a sequence having at least 85%, 90%, 95%, 96%, 97%, 98% or 99% nucleotide sequence identity thereto.

[0260] In some embodiments, the promoter is a LP1 promoter (SEQ ID NO: 432), or a variant having at least sequence at least 85%, 90%, 95%, 96%, 97%, 98% or 99% nucleotide sequence identity thereto.

[0261] In some embodiments of the methods to treat Pompe disease disclosed herein, a synthetic liver-specific promoter useful in the AAV vector is any LSP promoter selected from SEQ ID NOS: 86, 88, 91-96, 146-150, 439-441 as disclosed herein, or any LSP selected from SEQ ID NO: 270-341 or 342-430 as disclosed herein, or a synthetic liver-specific promoter thereof which is able to promote liver-specific transgene expression and has an activity in liver cells which is at least 15%, 20%, 30%, 40%, 50%, 60%, 70%, 80%, 90%, 100%, 125%, 150%, 175%, 200%, 250%, 300%, 350% or 400% of the activity of the TTR promoter comprising SEQ ID NO: 431 as International Application WO2021102107, or a synthetic promoter which is disclosed in Table 4 of International Application WO2021102107, which is incorporated herein in its entirity by reference.

[0262] In some embodiments, a synthetic liver specific promoter is selected from any of: SEQ ID NOS: 86, 88, 91-96, 146-150, or 270-430 as disclosed herein, or nucleic acid sequence that is at least 80%, or at least 90% or 95% identical thereto or to the source regulatory nucleic acid sequence.

[0263] In some embodiments, a liver-specific promoter (LSP) in a AAV expressing a GAA polypeptide as disclosed herein and useful in the methods to treat Pompe disease as disclosed herien comprises a nucleic acid sequence selected from any promoter listed from SEQ ID NOS: 86 (CRM 0412), SEQ ID NO: 91 (SP0412) or SEQ ID NO: 92 (SP0422), SEQ ID NOS: 93 (SP0239), SEQ ID NO: 94 (SP0265), SEQ ID NO: 95 (SP0240) or SEQ ID NO: 96 (SP0246), or SEQ ID NO: 146 (SP0265-UTR), SEQ ID NO: 147 (SP0239-UTR), SEQ ID NO: 148 (SP0240-UTR), SEQ ID NO: 149 (SP0246-UTR) or SEQ ID NO: 150 (SP0131-A1-UTR), SEQ ID NO: 439 (LVR_0243); SEQ ID NO: 440 (LVR_0412) and SEQ ID NO: 441 (A1 Promoter), as disclosed herein, or a functional fragment or variant of any LSP selected from SEQ ID NO: 270-341 or 342-430, or a functional fragment or variant thereof of SEQ ID NOS: 86, 88, 91-96, or 146-150, 439-441 or 270-430.

[0264] In some embodiments of the methods to treat Pompe disease disclosed herein, a synthetic liver-specific promoter is selected from any or any LSP promoter selected from SEQ ID NOS: 86 (CRM 0412), SEQ ID NO: 91 (SP0412) or SEQ ID NO: 92 (SP0422), SEQ ID NOS: 93 (SP0239), SEQ ID NO: 94 (SP0265), SEQ ID NO: 95 (SP0240) or SEQ ID NO: 96 (SP0246), or SEQ ID NO: 146 (SP0265-UTR), SEQ ID NO: 147 (SP0239-UTR), SEQ ID NO: 148 (SP0240-UTR), SEQ ID NO: 149 (SP0246-UTR) or SEQ ID NO: 150 (SP0131-A1-UTR), SEQ ID NO: 439 (LVR_0243); SEQ ID NO: 440 (LVR_0412) and SEQ ID NO: 441 (A1 Promoter), or any LSP selected from SEQ ID NO: 270-341 or 342-430 as disclosed herein, where the synthetic liver-specific promoter is able to promote liver-specific transgene expression and has an activity in liver cells which is at least 15%, 20%, 30%, 40%, 50%, 60%, 70%, 80%, 90%, 100%, 125%, 150%, 175%, 200%, 250%, 300%, 350% or 400% of the activity of the TBG promoter of SEQ ID NO: 435.

[0265] In some embodiments of the methods to treat Pompe disease disclosed herein, a synthetic liver-specific promoter is selected from any or any LSP promoter selected from any of SEQ ID NO: 97, SEQ ID NO: 98 or SEQ ID NO: 99, or a variant having at least sequence at least 85%, 90%, 95%, 96%, 97%, 98% or 99% nucleotide sequence identity thereto. In some embodiments of the methods to treat Pompe disease disclosed herein, a synthetic liver-specific promoter is selected from any or any LSP promoter selected from SEQ ID NO: 97, SEQ ID NO: 98 or SEQ ID NO: 99, or a variant having at least sequence at least 85%, 90%, 95%, 96%, 97%, 98% or 99% nucleotide sequence identity thereto, where the synthetic liver-specific promoter is able to promote liver-specific transgene expression and has an activity in liver cells which is at least 15%, 20%, 30%, 40%, 50%, 60%, 70%, 80%, 90%, 100%, 125%, 150%, 175%, 200%, 250%, 300%, 350% or 400% of the activity of the TBG promoter of SEQ ID NO: 435.

[0266] In some embodiments, to achieve appropriate levels of GAA expression, the rAAV genotype comprises a liver specific promoter (LSP). A LSP enables expression of the operatively linked gene in the liver, and can in some embodiments, be and inducible LSP. In an embodiment, a LSP is located upstream 5′ and is operatively linked to the heterologous nucleic acid sequence encoding the GAA protein. Exemplary liver-specific promoters are disclosed herein, and include for example, the M3 liver specific promoter comprising a sequence of SEQ ID NO: 99, or a functional variant have at least 60%, at least 65%, at least 70%, at least 75%, at least 80%, at least 85%, at least 86%, at least 87%, at least 88%, at least 89%, at least 90%, at least 91%, at least 92%, at least 93%, at least 94%, at least 95%, at least 96%, at least 97%, at least 98%, at least 99%, or more of SEQ ID NO: 99.

[0267] In one embodiment, the liver promoter is a promoter that has some expression in the liver. In one embodiment, the promoter that has some expression in the liver is the M2 liver promoter comprising a sequence of SEQ ID NO: 98, or a functional variant have at least 60%, at least 65%, at least 70%, at least 75%, at least 80%, at least 85%, at least 86%, at least 87%, at least 88%, at least 89%, at least 90%, at least 91%, at least 92%, at least 93%, at least 94%, at least 95%, at least 96%, at least 97%, at least 98%, at least 99%, or more of SEQ ID NO: 98.

[0268] In some embodiments, the synthetic liver specific promoter comprises SEQ ID NO: 99, or nucleic acid sequence that is at least 50%, preferably 60%, 70%, 80%, 90% or 95% identical to the source regulatory nucleic acid sequence. In some embodiments, a synthetic liver specific promoter comprises SEQ ID NO: 99, or nucleic acid sequence that is at least 80%, or at least 90% or 95% identical to nucleotides 1-26 of SEQ ID NO: 99.

[0269] In some embodiments, a synthetic liver specific promoter that is at least 50%, 60%, 70%, 80%, 90% or 95% identical to SEQ ID NO: 99 comprises a nucleic acid sequence where 2% or 1% or fewer of the nucleotides of SEQ ID NO: 99 are altered. In some embodiments, a synthetic liver-specific promoter useful in the methods and compositions as disclosed herein is the same length, or not substantially altered, or 1, 2, 3, 4, 5, or 6 nucleotides longer or 1, 2, 3, 4, 5, or 6 shorter than the length of SEQ ID NO: 99.

In some embodiments, no nucleotides have been deleted when compared to SEQ ID NO: 99. In some embodiments, no nucleotides are inserted when compared to SEQ ID NO: 99. In some embodiments, all modifications made to SEQ ID NO: 99 are nucleotide substitutions.

[0270] In some embodiments, a synthetic liver specific promoter that is at least 50%, 60%, 70%, 80%, 90% or 95% identical to SEQ ID NO: 99 comprises a source regulatory nucleic acid sequence which is active in liver, and the second type of cell or tissue is muscle; or a source regulatory nucleic acid sequence which is active in liver, and the second type of cell or tissue is CNS; or a source regulatory nucleic acid sequence which is active in muscle, and the second type of cell or tissue is liver; or a source regulatory nucleic acid sequence which is active in muscle, and the second type of cell or tissue is CNS.

[0271] In some embodiments, a liver-specific promoter which is a functional variant of a given promoter element preferably retains at least 80% of its activity, more preferably at least 90% of its activity, more preferably at least 95% of its activity, and yet more preferably 100% of its activity (compared to the reference promoter comprising the unmodified promoter element). Suitable assays for assessing liver-specific promoter activity are disclosed in Examples 12 and 13 of International Application WO2021102107 which is incorporated herein in its entirity by reference.

[0272] In some embodiments, liver specific promoters include, but are not limited to, transthyretin promoter (TTR), LSP promoter (LSP), a synthetic liver specific promoter. For example, in some embodiments of the methods and compositions as disclosed herein, the promoter is a liver specific promoter (LSP), and can be selected from any liver specific promoters including, but not limited to, a transthyretin promoter (TTR), a Liver specific promoter (LSP), for example, as disclosed in U.S. Pat. No. 5,863,541 (TTR promoter), or LSP promoter (PNAS; 96: 3906-3910, 1999. See e.g. p. 3906, Materials and Methods, rAAV construction), a synthetic liver promoter, the references which are incorporated herein in their entireties by reference. Other liver promoters can be used, for example, synthetic liver promoters.

[0273] In some embodiments, the TTR promoter is a truncated TTR promoter, e.g., comprising SEQ ID NO: 431, or SEQ ID NO: 12 as disclosed in International WO 2020102645, which is incorporated herein in its entirity by reference, or a variant having at least sequence at least 85%, 90%, 95%, 96%, 97%, 98% or 99% nucleotide sequence identity thereto. In some embodiments, the LSP is a TBG promoter, e.g., comprising SEQ ID NO: 435, or a variant having at least sequence at least 85%, 90%, 95%, 96%, 97%, 98% or 99% nucleotide sequence identity thereto.

[0274] Other liver specific promoters include, but are not limited to promoters for the LDL receptor, Factor VIII, Factor IX, phenylalanine hydroxylase (PAH), ornithine transcarbamylase (OTC), and a 1-antitrypsin (hAAT), and HCB promoter. In Other liver specific promoters include the AFP (alpha fetal protein) gene promoter and the albumin gene promoter, as disclosed in EP Patent Publication 0 415 731, the a-1 antitrypsin gene promoter, as disclosed in Rettenger, Proc. Natl. Acad. Sci. 91 (1994) 1460-1464, the fibrinogen gene promoter, the APO-A1 (Apolipoprotein A1) gene promoter, and the promoter genes for liver transference enzymes such as, for example, SGOT, SGPT and g-glutamyle transferase. See also 2001/0051611 and PCT Patent Publications WO 90/07936 and WO 91/02805, which are incorporated herein in their entirety by reference. In some embodiments, the liver specific promoter is a recombinant liver specific promoter, e.g., as disclosed in US20170326256A1, which is incorporated herein in its entirety by reference.

[0275] In some embodiments, a liver specific promoter is the hepatitis B X-gene promoter and the hepatitis B core protein promoter. In some embodiments, liver specific promoters can be used with their respective enhancers. The enhancer element can be linked at either the 5′ or the 3′ end of the nucleic acid encoding the GAA polypeptide. The hepatitis B X gene promoter and its enhancer can be obtained from the viral genome as a 332 base pair EcoRV-NcoI DNA fragment employing the methods described in Twu, J Virol. 61 (1987) 3448-3453. The hepatitis B core protein promoter can be obtained from the viral genome as a 584 base pair BamHI-Bglll DNA fragment employing the methods described in Gerlach, Virol 189 (1992) 59-66. It may be necessary to remove the negative regulatory sequence in the BamHI-Bglll fragment prior to inserting it.

[0276] It is envisioned that the liver-specific promoter used to express the GAA polypeptide is selected in combination with, or in conjunction with the selection of the signal sequence. In particular, without wishing to be bound by theory, if a strong liver-specific promoter is selected, the signal sequence should be selected that is sufficient to secrete the expressed GAA out of the cell, in order to avoid GAA accumation in the cell and any associated cell toxicity, and/or to avoid the generation of anti-GAA antibodies.

[0277] It is encompassed that the LSP is selected in conjunction with the signal sequence, so that the strength of the liver specific promoter (LSP) that is operatively linked to the nucleic acid encoding the GAA polypeptide can be counter-balanced with the ability of the cell to secrete the expressed GAA protein. Thus, if the liver specific promoter is strong, the specific signal sequence must be sufficiently effective to allow for the expressed GAA can be secreted from the cell so that GAA does not accumulate and create cell toxicity and/or induce an immune response. Thus, the cell secretory pathway, and the selected signal sequence must be able to match the level of GAA expressed by the AAV, where the level of GAA expression is dependent on both the AAV transduction efficacy (determined by AAV dose and capsid) and the strength of the liver specific promoter.

### G. UTRs, Regulatory Sequences and Intron Sequences

[0278] In some embodiments, the liver-specific promoters as set out above are operably linked to one or more additional regulatory sequences. An additional regulatory sequence can, for example, enhance expression compared to the liver-specific promoter which is not operably linked the additional regulatory sequence. Generally, it is preferred that the additional regulatory sequence does not substantively reduce the specificity of the liver-specific promoter.

[0279] For example, the liver-specific promoter can be operably linked to a sequence encoding a UTR (e.g., a 5′ and/or 3′ UTR), an intron, an UTR (e.g., 5′ or 3′)+intron, or such. In some embodiments, the liver-specific promoter is operably linked to sequence encoding a UTR, e.g., a 5′ UTR. A 5′ UTR can contain various elements that can regulate gene expression. The 5′ UTR in a natural gene begins at the transcription start site and ends one nucleotide before the start codon of the coding region. It should be noted that 5′ UTRs as referred to herein may be an entire naturally occurring 5′ UTR or it may be a portion of a naturally occurring 5′ UTR. The 5′UTR can also be partially or entirely synthetic. In eukaryotes, 5′ UTRs have a median length of approximately 150 nt, but in some cases they can be considerably longer. Regulatory sequences that can be found in 5′ UTRs are disclosed in International Application WO2021102107 which is incorporated herein in its entirity by reference.

[0280] In some embodiments, a 5-UTR sequence is located 3′ of a liver specific promoter as disclosed herein, and 5′ of the heterologous nucleic acid sequence (e.g., encoding a signal peptide and GAA polypeptide).

[0281] In one embodiment, an exemplary 5-UTR sequence comprises, for example, a 24 bp sequence of SEQ ID NO: 41, or a functional variant have at least 60%, at least 65%, at least 70%, at least 75%, at least 80%, at least 85%, at least 86%, at least 87%, at least 88%, at least 89%, at least 90%, at least 91%, at least 92%, at least 93%, at least 94%, at least 95%, at least 96%, at least 97%, at least 98%, at least 99%, or more of SEQ ID NO: 41.

[0282] In one embodiment, an exemplary 5-UTR sequence comprising SEQ ID NO: 41 is the sequence of SEQ ID NO: 40, or a functional variant have at least 60%, at least 65%, at least 70%, at least 75%, at least 80%, at least 85%, at least 86%, at least 87%, at least 88%, at least 89%, at least 90%, at least 91%, at least 92%, at least 93%, at least 94%, at least 95%, at least 96%, at least 97%, at least 98%, at least 99%, or more of SEQ ID NO: 40.

[0283] In some embodiments, the 5-UTR sequence comprises SEQ ID NO: 41 or SEQ ID NO: 40, or nucleic acid sequence that is at least 50%, preferably 60%, 70%, 80%, 90% or 95% identical to the source regulatory nucleic acid sequence. In some embodiments, a 5-UTR sequence comprises SEQ ID NO: 41 or SEQ ID NO: 40 or nucleic acid sequence that is at least 80%, or at least 90% or 95% identical to nucleotides of SEQ ID NO: 41 or SEQ ID NO: 40.

[0284] In some embodiments, a 5-UTR that is at least 50%, 60%, 70%, 80%, 90% or 95% identical to SEQ ID NO: 41 or SEQ ID NO: 40 comprises a nucleic acid sequence where 2% or 1% or fewer of the nucleotides of SEQ ID NO: 41 or SEQ ID NO: 40 are altered. In some embodiments, a 5-UTR sequence useful in the methods and compositions as disclosed herein is the same length, or not substantially altered, or 1, 2, 3, 4, 5, or 6 nucleotides longer or 1, 2, 3, 4, 5, or 6 shorter than the length of SEQ ID NO: 41 or SEQ ID NO: 40.

[0285] Introns within 5′ UTRs have been linked to regulation of gene expression and mRNA export. In some embodiments, a liver-specific promoter as set out above is operably linked to a sequence encoding a 5′ UTR derived from the CMV major immediate gene (CMV-IE gene). For example, the 5′ UTR from the CMV-IE gene suitably comprises the CMV-IE gene exon 1 and the CMV-IE gene exon 1, or portions thereof. In some cases, the promoter element may be modified in view of the linkage to the 5′UTR, for example sequences downstream of the transcription start site (TSS) in the promoter element can be removed (e.g. replaced with the 5′ UTR).

[0286] The CMV-IE 5′UTR is described in Simari, et al, Molecular Medicine 4: 700-706, 1998 “Requirements for Enhanced Transgene Expression by Untranslated Sequences from the Human Cytomegalovirus Immediate-Early Gene”, which is incorporated herein by reference. Variants of the CMV-IE 5′ UTR sequences discussed in Simari, et al. are also set out in WO2002/031137, incorporated by reference, and the regulatory sequences disclosed therein can also be used. Other UTRs that can be used in combination with a promoter are known in the art, e.g. in Leppek, K., Das, R. & Bama, M. “Functional 5′ UTR mRNA structures in eukaryotic translation regulation and how to find them”. Nat Rev Mol Cell Biol 19, 158-174 (2018), incorporated by reference.

[0287] In some embodiments the sequence encoding the 5′ UTR comprises SEQ ID NO: 145 as disclosed herein, or a functional variant thereof. In some embodiments, functional variants may have a sequence that is at least 60%, 65%, 70%, 75%, 80%, 85%, 90%, 95%, 96%, 97%, 98%, or 99% identical thereto. SEQ ID NO: 145 as disclosed herein encodes a CMV-IE 5′ UTR.

[0288] In some embodiments the sequence encoding the 5′ UTR comprises SEQ ID NO: 446 as disclosed herein, or a functional variant thereof. In some embodiments, functional variants may have a sequence that is at least 60%, 65%, 70%, 75%, 80%, 85%, 90%, 95%, 96%, 97%, 98%, or 99% identical thereto. SEQ ID NO: 446 as disclosed herein, which is a modified CMV-IE intron sequence.

[0289] In some embodiments the 5′ UTR comprises a nucleic acid motif that functions as the protein translation initiation site, e.g. sequences that define a Kozak sequence in the mRNA produced. For example, in some embodiments, the sequence encoding the 5′ UTR comprises the sequence motif GCCACC at or near its 3′ end. Other Kozak sequences or other protein translation initiation sites can be used, as is known in the art (e.g. Marilyn Kozak, “Point Mutations Define a Sequence Flanking the AUG Initiator Codon That Modulates Translation by Eukaryotic Ribosomes” Cell, Vol. 44, 283-292, Jan. 31, 1986; Marilyn Kozak “At Least Six Nucleotides Preceding the AUG Initiator Codon Enhance Translation in Mammalian Cells” J. Mol. Rid. (1987) 196, 947-950; Marilyn Kozak “An analysis of 5′-noncoding sequences from 699 vertebrate messenger RNAs” Nucleic Acids Research. Vol. 15 (20) 1987, all of which are incorporated herein by reference). The protein translation initiation site (e.g. Kozak sequence) is preferably positioned immediately adjacent to the start codon.

[0290] In some embodiments, a sequence encoding a 5′ UTR comprises SEQ ID NO: 438 as disclosed herein, or a functional variant thereof. In some embodiments, functional variants may have a sequence that is at least 60%, 65%, 70%, 75%, 80%, 85%, 90%, 95%, 96%, 97%, 98%, or 99% identical thereto. This 5′ UTR comprises six nucleotides of GCCACC, which define a Kozak sequence at the 3′ end of the CMV-IE 5′ UTR.

[0291] In some embodiments, the rAAV expressing GAA for use in the methods to treat Pompe as disclosed herien comprises an intron sequence located 3′ of the promoter sequence and 5′ of the heterologous nucleic acid (i.e., 5′ of the nucleic acid encoding the signal peptide and GAA polypeptide). Intron sequences serve to increase one or more of: mRNA stability, mRNA transport out of nucleus and/or expression and/or regulation of the expressed GAA polypeptide. In alternative embodiments, a rAAV genotype does not comprise an intron sequence.

[0292] In one embodiment, a UTR sequence described herein can be used as a 3′UTR.

[0293] A synthetic liver-specific promoter according to the present invention can be operably linked to a sequence encoding a UTR (e.g. a 5′ and/or 3′ UTR), and/or an intron, or suchlike. In some embodiments, a synthetic liver specific promoter as set herein, is operably linked to a sequence encoding a 5′ UTR and an intron. In some embodiments, the 5′ UTR and intron is derived from the CMV major immediate gene (CMV-IE gene). The CMV-IE 5′UTR and intron is described in Simari, et al., Molecular Medicine 4: 700-706, 1998 “Requirements for Enhanced Transgene Expression by Untranslated Sequences from the Human Cytomegalovirus Immediate-Early Gene”, which is incorporated herein by reference. Variants of the CMV-IE 5′ UTR and intron sequences discussed in Simari, et al. are also set out in WO2002/031137, incorporated by reference, and the regulatory sequences disclosed therein can also be used. In some embodiments the 5′ UTR or the 5′ UTR and intron suitably comprises a nucleic acid motif that functions as the protein translation initiation site, e.g. sequences that define a Kozak sequence in the mRNA produced. For example, in some embodiments, the sequence encoding the 5′ UTR comprises the sequence motif GCCACC at or near its 3′ end. Other Kozak sequences or other protein translation initiation sites can be used, as is known in the art (e.g. Marilyn Kozak, “Point Mutations Define a Sequence Flanking the AUG Initiator Codon That Modulates Translation by Eukaryotic Ribosomes” Cell, Vol. 44, 283-292, Jan. 31, 1986; Marilyn Kozak “At Least Six Nucleotides Preceding the AUG Initiator Codon Enhance Translation in Mammalian Cells” J. Mol. Rid. (1987) 196, 947-950; Marilyn Kozak “An analysis of 5”-noncoding sequences from 699 vertebrate messenger RNAs” Nucleic Acids Research. Vol. 15 (20) 1987, all of which are incorporated herein by reference). The protein translation initiation site (e.g. Kozak sequence) is preferably positioned immediately adjacent to the start codon.

[0294] In some embodiments, any one of the promoters described herein, or variants thereof, is linked to a sequence encoding a 5′ UTR and/or a 5′UTR and an intron to provide a composite promoter. Herein, such composite promoter may be referred to simply as “composite promoters”, or in some cases simply “promoters” for brevity.

[0295] In some embodiments, the intron sequence is a MVM intron sequence, for example, but not limited to intron sequence of SEQ ID NO: 442, or nucleic acid sequence having at least 80%, 85%, 90%, 95%, 96%, 97%, 98% or 99% nucleotide sequence identity thereto.

[0296] In some embodiments, the intron sequence is a HBB2 intron sequence, for example, but not limited to and intron sequence of SEQ ID NO: 443 or SEQ ID NO: 444 or nucleic acid sequence having at least 80%, 85%, 90%, 95%, 96%, 97%, 98% or 99% nucleotide sequence identity thereto.

[0297] In some embodiments of the methods and compositions disclosed herein, a recombinant AAV vector comprises a heterologous nucleic acid sequence that further comprises an intron sequence located 5′ of the sequence encoding the secretory signal peptide, and 3′ of the promoter. In some embodiments, the intron sequence comprises a MVM sequence or a HBB2 sequence, wherein the MVM sequence comprises the nucleic acid sequence of SEQ ID NO: 442, or a nucleic acid sequence at least about 75%, or 80%, or 85%, or 90%, or 95%, or 98%, or 99% sequence identity to SEQ ID NO: 442, and the HBB2 sequence comprises the nucleic acid sequence of SEQ ID NO: 443 or SEQ ID NO: 444, or a nucleic acid sequence at least about 75%, or 80%, or 85%, or 90%, or 95%, or 98%, or 99% sequence identity to SEQ ID NO: 443 or SEQ ID NO: 444.

[0298] In some embodiments, the intron sequence is a ubiquitin C (UBC) intron sequence, e.g., intron 1 from the UBC gene, or a portion thereof, e.g., as disclosed in Bianchi et al, 2009, Gene, 448 (1); 88-101, where the intron 1 sequence of the UBC gene is 812 bp and starts at chromosomal location 124,914,586, and ends at 124,913,775. In some embodiments, the intron sequence is a UBC intron, for example, but not limited to intron sequence of SEQ ID NO: 445, or nucleic acid sequence having at least 80%, 85%, 90%, 95%, 96%, 97%, 98% or 99% nucleotide sequence identity to SEQ ID NO: 445.

[0299] In some embodiments, the rAAV genotype comprises an intron sequence selected in the group consisting of a human beta globin b2 (or HBB2) intron, a FIX intron, a chicken beta-globin intron, a CMVIE intron, a UBC intron, a HBB intron sequence, a MVM sequence and a SV40 intron. In some embodiment, the intron is intron 1 from human RNA pol II. In some embodiments, the intron is optionally a modified intron such as a modified HBB2 intron (see, e.g., SEQ ID NO: 17 in of WO2018046774A1): a modified FIX intron (see., e.g., SEQ ID NO: 19 in WO2018046774A1), or a modified chicken beta-globin intron (e.g., see SEQ ID NO: 21 in WO2018046774A1), or modified HBB2 or FIX introns disclosed in WO2015/162302, which are incorporated herein in their entirety by reference.

### H. Poly-A Sequences and Terminator Sequences

[0300] In some embodiments, an rAAV vector genome includes at least one poly-A tail that is located 3′ and downstream from the heterologous nucleic acid gene encoding the GAA polypeptide. Any polyA sequence can be used, including but not limited to hGH poly A, BGH poly A, SV40 poly A, synpA polyA and the like. In some embodiments, the polyA is a synthetic polyA sequence. In some embodiments, the rAAV vector genome comprises two poly-A tails, e.g., a hGH poly A sequence and another polyA sequence, where a spacer nucleic acid sequence is located between the two poly A sequences.

[0301] In some embodiments, the polyA signal is 3′ of the heterologous nucleic acid sequence encoding the GAA polypeptide. In some embodiments, the rAAV genome comprises 3′ of the nucleic acid encoding the GAA polypeptide, a first polyA sequence and a reverse RNA polymerase II terminator sequence (rev RNA PolII terminator sequence), and the 3′ ITR. Non limiting examples of first polyA is hGH poly A, BGH poly A, SV40 poly A or, any functional fragment thereof in 5′ to 3′ orientation. Non limiting examples of reverse RNA polymerase II terminator sequence is hGH poly A, BGH poly A, SV40 poly A or, any functional fragment thereof in 3′ to 5′ orientation.

[0302] In some embodiments, the rAAV genome comprises 3′ of the nucleic acid encoding the GAA polypeptide, a first polyA sequence, a spacer nucleic acid sequence (e.g., of between 100-400 bp, or about 100-250 bp, or about 250-400 bp), a second poly A sequence, a spacer nucleic acid sequence, and the 3′ ITR.

[0303] In some embodiments, the first and/or second poly A sequence is a hGH poly A sequence, and in some embodiments, the first and second poly A sequences are a synthetic poly A sequence. In some embodiments, the first poly A sequence is a hGH poly A sequence and the second poly A sequence is a synthetic sequence, or vice versa—that is, in alternative embodiments, the first poly A sequence is a synthetic poly A sequence and the second poly A sequence is a hGH polyA sequence.

[0304] In some embodiments, the poly A sequence is selected from any of: SEQ ID NO: 42, SEQ ID NO: 43 or SEQ ID NO: 44, where SEQ ID NO: 44 comprises the signal AATAAA, or a poly A nucleic acid sequence having at least 80%, 85%, 90%, 95%, 96%, 97%, 98% or 99% nucleotide sequence identity to any of SEQ ID NOS: 42, 43 or 44.

[0305] In some embodiments, the poly A sequence is selected from any of: SEQ ID NO: 46 or SEQ ID NO: 47, or a poly A nucleic acid sequence having at least 80%, 85%, 90%, 95%, 96%, 97%, 98% or 99% nucleotide sequence identity to any of SEQ ID NOS: 46 or 47.

[0306] In some embodiments, the poly A sequence is, for example, SEQ ID NO: 15 as disclosed in International WO2021102107 (hGH poly A sequence), or a poly A nucleic acid sequence having at least 80%, 85%, 90%, 95%, 96%, 97%, 98% or 99% nucleotide sequence identity to SEQ ID NO: 15 as disclosed in International Application WO2021102107. In some embodiments, the hGHpoly sequence encompassed for use is described in Anderson et al. J. Biol. Chem 264(14); 8222-8229, 1989 (See, e.g., p. 8223, 2nd column, first paragraph) which is incorporated herein in its entirety by reference.

[0307] In one embodiment, the recombinant AAV disclosed herein comprises in its genome a transcriptional terminator signal sequence or a transcriptional pause signal sequence in the reverse orientation between polyA and 3′ITR. In one embodiment, the recombinant AAV disclosed herein comprises in its genome a transcriptional terminator signal sequence or a transcriptional pause signal sequence that is in the 3′-5′ orientation between polyA and 3′ITR. Any transcription termination signal can be used including, e.g., inverted natural polyA sequences from any species or synthetic polyA signals or fragments thereof, or other nucleic acid structure terminators known in the art. Exemplary polyA signals and/or transcription terminators include, but are not limited to the polyA signals of BGH, SV40, HGH, Betaglobin, RNA polymerase II transcriptional pause signal from alpha 2 globin gene, transcription termination signal for pol III, or fragments thereof, and in any combination thereof.

[0308] In some embodiments, a transcriptional terminator signal sequence is a reverse RNA polymerase II terminator sequence which is, in a 5′ to 3′ orientation SEQ ID NO: 45, or a rev RNA PolII terminator sequence having at least 80%, 85%, 90%, 95%, 96%, 97%, 98% or 99% nucleotide sequence identity to any of SEQ ID NOS: 45, where SEQ ID NO: 45 orientated in a 5′ to 3′ direction is located between the 3′ of the poly A sequence and 5′ of the right ITR sequence (or 3′ ITR).

[0309] A transcription terminator signal or reverse RNA Polymerase II terminator sequence as described here is also interchangeably be called a “reverse poly A,” which refers to a polyA signal sequence placed in a 3′-5′ orientation downstream of the nucleic acid encoding GAA and upstream of 3′ITR. Any natural or synthetic poly A in 3′-5′ orientation can be used as reverse poly A. In some embodiments, the reverse poly A is the poly A (pA) as described in International publication no. WO2019143950 and US application publication no. US20200340013, which are incorporated herein by reference in its entirety.

[0310] For the sake of clarity, “reverse poly A,” “the double stranded RNA termination element,” and “reverse RNA Polymerase II terminator sequence” are used interchangeably herein. In 3′ to 5′ orientation, the reverse poly A or termination element does not allow transcription from 3′ITR, and hence double stranded RNA is not transcribed from 3′ITR. The reverse poly A or double stranded RNA termination element can be heterologous, e.g., from a different gene, for example, other than the gene of interest, or homologous to, e.g., the same gene as the gene of interest. In various embodiments, the poly A signal comprises the double stranded RNA transcription element or reverse poly A. For example, the poly A signal of several aspects of the invention described herein comprises a full length poly A signal in 5′ to 3′ orientation and another poly A signal in 3′ to 5′ orientation. In some embodiments, the 5′ end of double stranded RNA termination element or reverse poly A sequence, and the 3′ end of poly A signal are immediately next to each other, or at least 1 nucleotide apart, or at least 2 nucleotides apart, or at least 3 nucleotides apart, or at least 4 nucleotides apart, or at least 5 nucleotides apart, or or at least 6 nucleotides apart, or at least 7 nucleotides apart, or at least 8 nucleotides apart, or at least 9 nucleotides apart, or at least 10 nucleotides apart, or more apart. In some embodiments, the poly A signal does not comprise double stranded RNA transcription element or reverse poly A. In some embodiments, the poly A signal comprises AATAAA (SEQ ID NO: 467) or AAUAAA (SEQ ID NO: 468). In some embodiments, the poly A signal comprises at least 1, at least 2, at least 3, at least 4, at least 5, at least 6, at least 7, at least 8, at least 9, at least 10 repeats or more of AATAAA (SEQ ID NO: 467) or AAUAAA (SEQ ID NO: 468). In some embodiments, the poly A signal comprises transcription termination signal for Pol III as described in “Delineation of the Exact Transcription Termination Signal for Type 3 Polymerase III. Mol Ther Nucleic Acids. 2018 Mar. 2; 10:36-44, which is incorporated herein by reference in its entirety. In some embodiments, the one or more transcription termination signals for Pol III is in 3′ to 5′ orientation. In some embodiments, the poly A signal comprises TTTT. In some embodiments, poly A signal comprises AAAAAAA (SEQ ID NO: 469). The poly A sequences as described in “Definition of an efficient synthetic poly(A) site” Genes Dev. 1989 July; 3(7):1019-25. doi: 10.1101/gad.3.7.1019., which is incorporated by reference in its entirety. All the above poly A sequences and or terminator sequences described herein can be used as inverted sequence e.g., in 3′ to 5′ orientation.

[0311] In some aspects of the invention descried herein, the poly A sequence comprises poly A sequence and a terminator sequence, e.g., the poly A sequence comprises hGH Poly A sequence and a Pol III terminator sequence. In various aspects of the invention, the poly A sequence and Pol III terminator sequences are interchangeably referred to as “poly A.” In several aspects of the invention described herein, the poly A sequence further comprises a Reverse RNA Polymerase II terminator sequence, or RNA Polymerase II transcriptional pause signal sequence, or reverse poly A. Without any limitation, an example of Reverse RNA Polymerase II terminator sequence, or RNA Polymerase II transcriptional pause signal sequence, or reverse Poly A, is the 3′ sequence of the human hemoglobin alpha gene.

[0312] In some embodiments, a poly-A tail can be engineered to stabilize the RNA transcript that is transcribed from an rAAV vector genome, including a transcript for a heterologous gene, which in one embodiment is a GAA, and in alternative embodiments, the poly-A tail can be engineered to include elements that are destabilizing.

[0313] In one embodiment, the polyA is a bi-directional polyA sequence. Bi-directional polyA sequences are commonly isolated from virual DNA, for example, the SV40 polyA is a bi-directional polyA.

[0314] In some embodiments of the methods to treat Pompe disease as disclosed herein, a recombinant AAV vector comprises at least one polyA sequence located 3′ of the nucleic acid encoding the GAA gene and 5′ of the 3′ ITR sequence. In some embodiments, the poly A is a full length poly A (fl-polyA) sequence. In some embodiments, the polyA is a truncated polyA sequence as disclosed in International WO2021102107, which is incorporated herein in its entirity.

[0315] In an embodiment, a poly-A tail can be engineered to become a destabilizing element by altering the length of the poly-A tail. In an embodiment, the poly-A tail can be lengthened or shortened.

[0316] In some embodiments, there is a 3′ untranslated regions (3′UTRs) located between the heterologous gene encoding the GAA polypeptide and the poly-A tail. In some embodiments, there is a 3′ UTR located 3′ of the nucleic acid sequence encoding the GAA polypeptide. In some embodiments, a 3′ untranslated region (3′UTR) comprises GAA 3′ UTR (SEQ ID NO: 50) or a 3′ UTR (SEQ ID NO: 49) as disclosed herein.

[0317] In another embodiment, a promoter region, or 3′ UTR or polyA region can comprise a destabilizing element, is a target sequence for a microRNA (miRNA) that has the ability to silence (repress translation and promote degradation) the RNA transcripts when the miRNA binds to a miRNA target sequence. Accordingly, in some embodiments, addition or deletion of seed regions within the 3-UTR or a poly-A tail can increase or decrease expression of a protein, such as the GAA polypeptide. In some embodiments, the miRNA target region is a synthetic miRNA target region which is targeted by an artificial miRNA (amiRNA) according to methods known in the art.

[0318] In another embodiment, seed regions can also be engineered into the 3′ untranslated regions (3′UTRs) located between the heterologous gene and the poly-A tail. In a further embodiment, the destabilizing agent can be an siRNA. The coding region of the siRNA can be included in an rAAV vector genome and is generally located downstream, 3′ of the poly-A tail.

[0319] In all aspects of the methods for treating Pompe disease as disclosed herein, the rAAV genome may also comprise a Stuffer DNA nucleic sequence. An exemplary stuffer DNA sequence is SEQ ID NO: 71 as disclosed in International Application WO2021102107, or a nucleic acid sequence having at least 80%, 85%, 90%, 95%, 96%, 97%, 98% or 99% nucleotide sequence identity thereto.

[0320] In some embodiments, the stuffer sequence is located 3′ of the poly A tail, for example, and is located 5‘ of the’3 ITR sequence. In some embodiments, the stuffer DNA sequence comprises a synthetic polyadenylation signal in the reverse orientation.

[0321] In some embodiments, a stuffer nucleic acid sequence (also referred to as a “spacer” nucleic acid fragment) can be located between the poly A sequence and the 3′ ITR (i.e., a stuffer nucleic acid sequence is located 3′ of the polyA sequence and 5′ of the 3′ ITR). Such a stuffer nucleic acid sequence can be about 30 bp, 50 pb, 75 bp, 100 bp, 150 bp, 200 bp, 250 bp, 300 bp or longer than 300 bp. In some embodiments of the methods and compositions as disclosed herein, a stuffer nucleic acid fragment is between 20-50 bp, 50-100 bp, 100-200 bp, 200-300 bp, 300-500 bp, or any integer between 20-500 bp. Exemplary stuffer (or spacer) nucleic acid sequence can be selected from any of: SEQ ID NO: 16, SEQ ID NO: 71 or SEQ ID NO: 78 as disclosed in International Application WO2021102107, or a nucleic acid sequence at least about 70, 71, 72, 73, 74, 75, 76, 77, 78, 79, 80, 81, 82, 83, 84, 85, 86, 87, 88, 89, 90, 91, 92, 93, 94, 95, 96, 97, 98, 99%, identical to SEQ ID NO: 16 or SEQ ID NO: 71 or SEQ ID NO: 78 as disclosed in International Application WO2021102107.

### E. CS Sequence

[0322] In some embodiments of the methods and compositions disclosed herein, a recombinant AAV vector comprises a heterologous nucleic acid sequence that can further comprises at collagen stability (CS) sequence located 3′ of the nucleic acid encoding the GAA polypeptide and 5′ of the 3′ ITR sequence. In some embodiments, the rAAV genome disclosed herein comprises a heterologous nucleic acid sequence that can optionally comprise a Collagen stability sequence (CS or CSS), which is positioned 3′ of the nucleic acid encoding the GAA polypeptide and 5′ of the nucleic acid encoding a polyA signal. In some embodiments, the CS sequence can be replaced by a 3′ UTR sequence as disclosed herein.

[0323] Exemplary collagen stability sequences include CCCAGCCCACTTTTCCCCAA or a sequence at least 85%, 90%, 95%, 96%, 97%, 98% or 99% sequence identity thereto. An exemplary collagen stability sequence can have an amino acid sequence of PSPLFP or an amino acid sequence having at least 85%, 90%, 95%, 96%, 97%, 98% or 99% sequence identity thereto. CS sequences are disclosed in Holick and Liebhaber, Proc. Nat. Acad. Sci. 94: 2410-2414, 1997 (See, e.g. FIG. 3, p. 5205), which is incorporated herein its entirety by reference.

### I. AAV ITRs

[0324] The rAAV vector or genome as disclosed herein for use in the methods to treat Pompe disease can comprise AAV ITRs that have desirable characteristics and can be designed to modulate the activities of, and cellular responses to vectors that incorporate the ITRs. In another embodiment, the AAV ITRs are synthetic AAV ITRs that has desirable characteristics and can be designed to manipulate the activities of and cellular responses to vectors comprising one or two synthetic ITRs, including, as set forth in U.S. Pat. No. 9,447,433, which is incorporated herein by reference.

[0325] In another embodiment, an ITR exhibits modified transcription activity relative to a naturally occurring ITR, e.g., ITR2 from AAV2. It is known that the ITR2 sequence inherently has promoter activity. It also inherently has termination activity, similar to a poly(A) sequence. The minimal functional ITR of the present invention exhibits transcription activity as shown in the examples, although at a diminished level relative to ITR2. Thus, in some embodiments, the ITR is functional for transcription. In other embodiments, the ITR is defective for transcription. In certain embodiments, the ITR can act as a transcription insulator, e.g., preventing transcription of a transgenic cassette present in the vector when the vector is integrated into a host chromosome.

[0326] One aspect of the invention relates to an rAAV vector genome comprising at least one synthetic AAV ITR, wherein the nucleotide sequence of one or more transcription factor binding sites in the ITR is deleted and/or substituted, relative to the sequence of a naturally occurring AAV ITR such as ITR2. In some embodiments, it is the minimal functional ITR in which one or more transcription factor binding sites are deleted and/or substituted. In some embodiments at least 1 transcription factor binding site is deleted and/or substituted, e.g., at least 5 or more or 10 or more transcription factor binding sites, e.g., at least 1, 2, 3, 4, 5, 6, 7, 8, 9, 10, 11, 12, 13, 14, 15, 16, 17, 18, 19, 20, or 21 transcription factor binding sites.

[0327] Another embodiment, a rAAV vector, including an rAAV vector genome as described herein comprises a polynucleotide comprising at least one synthetic AAV ITR, wherein one or more CpG islands (a cytosine base followed immediately by a guanine base (a CpG) in which the cytosines in such arrangement tend to be methylated) that typically occur at, or near the transcription start site in an ITR are deleted and/or substituted. In an embodiment, deletion or reduction in the number of CpG islands can reduce the immunogenicity of the rAAV vector. This results from a reduction or complete inhibition in TLR-9 binding to the rAAV vector DNA sequence, which occurs at CpG islands. It is also well known that methylation of CpG motifs results in transcriptional silencing. Removal of CpG motifs in the ITR is expected to result in decreased TLR-9 recognition and/or decreased methylation and therefore decreased transgene silencing. In some embodiments, it is the minimal functional ITR in which one or more CpG islands are deleted and/or substituted. In an embodiment, AAV ITR2 is known to contain 16 CpG islands of which one or more, or all 16 can be deleted.

[0328] In some embodiments, at least 1 CpG motif is deleted and/or substituted, e.g., at least 4 or more or 8 or more CpG motifs, e.g., at least 1, 2, 3, 4, 5, 6, 7, 8, 9, 10, 11, 12, 13, 14, 15, or 16 CpG motifs.

[0329] In another embodiment, the synthetic ITR comprises, consists essentially of, or consists of one of the nucleotide sequences listed in Table 4. In other embodiments, the synthetic ITR comprises, consist essentially of, or consist of a nucleotide sequence that is at least 80% identical, e.g., at least 85%, 90%, 95%, 96%, 97%, 98%, or 99% identical to any one of the nucleotide sequences listed in Table 4. In some embodiments, the ITR is a sequence is disclosed in FIG. 1 of Samulski et al, 1983, Cell, 33; 135-143 (referred to “Samulski et al, 1983” as which is incorporated herein in its entirety by reference), which discloses modified ITR sequences in FIG. 1. In some embodiments, the ITR sequence comprises, or consists of a nucleotide sequence that is at least 80% identical, e.g., at least 85%, 90%, 95%, 96%, 97%, 98%, or 99% identical to one of the ITR sequences in FIG. 1 as disclosed in Samulski et al, 1993. In some embodiments, the ITR comprises, or consists of a nucleotide sequence that is at least 80% identical, e.g., at least 85%, 90%, 95%, 96%, 97%, 98%, or 99% or 99.5% identical to the ITR sequence of pSM 609 right disclosed in the middle panel of FIG. 1 (that lacks the 9 bp) disclosed in Samulski et al, 1983. In some embodiments, the ITR comprises a nucleotide sequence that is at least 80% identical, e.g., at least 85%, 90%, 95%, 96%, 97%, 98%, or 99% or 99.5% identical to the ITR sequence of any of SEQ ID NOs: 79-84 and 450-451.

[0330] In some embodiments, the ITR sequence, e.g., Right ITR (or 3′ ITR) is SEQ ID NO: 80 or SEQ ID NO: 82 or a nucleotide sequence that is at least 80% identical, e.g., at least 85%, 90%, 95%, 96%, 97%, 98%, or 99% or 99.5% identical to SEQ ID NO: 80 or SEQ ID NO: 82. In some embodiments, the ITR sequence, e.g., left ITR (or 5′ ITR) is SEQ ID NO: 79 or SEQ ID NO: 81 or a nucleotide sequence that is at least 80% identical, e.g., at least 85%, 90%, 95%, 96%, 97%, 98%, or 99% or 99.5% identical to SEQ ID NO: 79 or SEQ ID NO: 81.

TABLE 4
Exemplary synthetic ITR sequences

| | |
|---|---|
| L-ITR | CTGCGCGCTCGCTCGCTCACTGAGGCCGCCCGGGCAAAGCCCGGGCGTC |
| | GGGCGACCTTTGGTCGCCCGGCCTCAGTGAGCGAGCGAGCGCGCAGAGA |
| | GGGAGTGGCCAACTCCATCACTAGGGGTTCCT (SEQ ID NO: 79) |
| R-ITR | AGGAACCCCTAGTGATGGAGTTGGCCACTCCCTCTCTGCGCGCTCGCTCG |
| | CTCACTGAGGCCGGGCGACCAAAGGTCGCCCGACGCCCGGGCTTTGCCC |
| | GGGCGGCCTCAGTGAGCGAGCGAGCGCGCAG (SEQ ID NO: 80) |
| L-ITR | CTGCGCGCTCGCTCGCTCACTGAGGCCGCCCGGGCAAAGCCCGGGCGTC |
| | GGGCGACCTTTGGTCGCCCGGCCTCAGTGAGCGAGCGAGCGCGCAGAGA |
| | GGGAGTGGCCAACTCCATCACTAGGG (SEQ ID NO: 81) |
| R-ITR | AGGAACCCCTAGTGATGGAGTTGGCCACTCCCTCTCTGCGCGCTCGCTCG |
| | CTCACTGAGGCCGGGCGACCAAAGGTCGCCCGACGCCCGGGCTTTGCCC |
| | GGGCGGCCTCAGTGAGCGAGCGAGCGCGCAG (SEQ ID NO: 82) |
| MH-257 | AGGAACCCCTAGTGATGGAGTTGGCCACTCCCTCTCTGCGCGCTCGCTCG |
| | CTCACTGAGGCAATTTGATAAAAATCGTCAAATTATAAACAGGCTTTGCC |
| | TGTTTAGCCTCAGTGAGCGAGCGAGCGCGCAGAGAGGGAGTGGCCAACT |
| | CCATCACTAGGGGTTCCT (SEQ ID NO: 83) |
| MH-258 | AGGAACCCCTAGTGATGGAGTTGGCCACTCCCTCTCTGCGCGCTCGCTCG |
| | CTCACTGAGGGATAAAAATCCAGGCTTTGCCTGCCTCAGTGAGCGAGCG |
| | AGCGCGCAGAGAGGGAGTGGCCAACTCCATCACTAGGGGTTCCT (SEQ |
| | ID NO: 84) |
| MH Delta | AGGAACCCCTAGTGATGGAGTTGGCCACTCCCTCTCTGCGCGCTCGCTCG |
| 258 | CTCACTGAGGGATAAAAATCCAGGCTTTGCCTGCCTCAGTGAGCGAGCG |
| | AGCGCGCAGAGAGGGAGTGGCCAACTCCATCACTAGGGGTTCCT (SEQ |
| | ID NO: 85) |
| MH Telomere- | AGGAACCCCTAGTGATGGAGTTGGCCACTCCCTCTCTGGGATTGGGATTG |
| 1 ITR | CGCGCTCGCTCGCGGGATTGGGATTGGGATTGGGATTGGGATTGGGATTG |
| | ATAAAAATCAATCCCAATCCCAATCCCAATCCCAATCCCAATCCCGCGAG |
| | CGAGCGCGCAATCCCAATCCCAGAGAGGGAGTGGCCAACTCCATCACTA |
| | GGGGTTCCT (SEQ ID NO: 86) |
| MH Telomere- | AGGAACCCCTAGTGATGGAGTTGGCCACTCCCTCTCTGCGCGCTCGCTCG |
| 2 ITR | CTCGGGATTGGGATTGGGATTGGGATTGGGATTGGGATTGATAAAAATC |
| | AATCCCAATCCCAATCCCAATCCCAATCCCAATCCCGCGAGCGAGCGCGC |
| | AGGAGAGGGAGTGGCCAACTCCATCACTAGGGGTTCCTAAGCTTATTAT |
| | A (SEQ ID NO: 87) |
| MH PolII 258 | AGGAACCCCTAGTGATGGAGTTGGCCACTCCCTCTCTGCGCGCTCGCTCG |
| ITR | CTCACTGAGGGCGCCTATAAAGATAAAAATCCAGGCTTTGCCTGCCTCAG |
| | TTAGCGAGCGAGCGCGCAGAGAGGGAGTGGCCAACTCCATCACTAGGGG |
| | TTCCT (SEQ ID NO: 88) |
| MH 258 | CTAGTGATGGAGTTGGCCACTCCCTCTCTGCGCGCTCGCTCGCTCACTGA |
| Delta D | GGGATAAAAATCCAGGCTTTGCCTGCCTCAGTGAGCGAGCGAGCGCGCA |
| conservative | GAGAGGGAGTGGCCAACTCCATCACTAG (SEQ ID NO: 89) |
| 5′ ITR | TTGGCCACTCCCTCTCTGCGCGCTCGCTCGCTCACTGAGGCCGGGCGACC |
| | AAAGGTCGCCCGACGCCCGGGCTTTGCCCGGGCGGCCTCAGTGAGCGAG |
| | CGAGCGCGCAGAGAGGGAGTGGCCAACTCCATCACTAGGGGTTCCT (SEQ |
| | ID NO: 104) |
| 3′ ITR | AGGAACCCCTAGTGATGGAGTTGGCCACTCCCTCTCTGCGCGCTCGCTCG |
| | CTCACTGAGGCCGGGCGACCAAAGGTCGCCCGACGCCCGGGCTTTGCCC |
| | GGGCGGCCTCAGTGAGCGAGCGAGCGCGCAGAGAGGGAGTGGCCAA |
| | (SEQ ID NO: 105) |
| ITR (145 bp) | AGGAACCCCTAGTGATGGAGTTGGCCACTCCCTCTCTGCGCGCTCGCTCG |
| | CTCACTGAGGCCGGGCGACCAAAGGTCGCCCGACGCCCGGGCTTTGCCC |
| | GGGCGGCCTCAGTGAGCGAGCGAGCGCGCAGAGAGGGAGTGGCCAA |
| | (SEQ ID NO: 448) |
| ITR (145 bp- | AGGAACCCCTAGTGATGGAGTTGGCCACTCCCTCTCTGCGCGCTCGCTCG |
| 1983, lacking | CTCACTGAGGCCGGGCGACCAAAGGTCGCCCGACGCCCGGGCTTTGCCC |
| 9 bp) | GGGCGGCCTCAGTGAGCGAGCGAGCGCGCAGAGAGGG (SEQ ID NO: 449) |

### II. Vectors and Virions

[0331] In one embodiment, the rAAV vector (also referred to as a rAAV virion) as disclosed herein comprises a capsid protein, and a rAAV genome in the capsid protein. A rAAV capsid of the rAAV virion used to treat Pompe Disease is any of those listed in Table 3 herein, or in Table 1 as disclosed in International Applications WO2020/102645, and WO2020/102667, each of which are incorporated herein in their entirety. In one embodiment, a rAAV capsid of the rAAV virion used to treat Pompe Disease is an AAV8 capsid. In one embodiment, a rAAV vector is an rAAV8 vector.

TABLE 3
Table 3: AAV Serotypes and exemplary Published corresponding capsid sequence

TABLE 3

| Serotype and where capsid sequence is published | Serotype and where capsid sequence is published |
|---|---|
| AAV3.3b (See SEQ ID NO: 72 in US20030138772) | AAV3-3 (See SEQ ID NO: 200 |
| | US20150315612) |
| AAV3-3 (See SEQ ID NO: 217 US20150315612) | AAV3a ((See SEQ ID NO: 5 in U.S. Pat. No. 6,156,303) |
| AAV3a (See SEQ ID NO: 9 in U.S. Pat. No. 6,156,303) | AAV3b (See SEQ ID NO: 6 in U.S. Pat. No. 6,156,303) |
| AAV3b (See SEQ ID NO: 10 in U.S. Pat. No. 6,156,303) | AAV3b (See SEQ ID NO: 1 in U.S. Pat. No. 6,156,303) |
| AAV4 (See SEQ ID NO: 17 US20140348794) | AAV4 ((See SEQ ID NO: 5 in US20140348794) |
| AAV4 (See SEQ ID NO: 3 in US20140348794) | AAV4 (See SEQ ID NO: 14 in |
| | US20140348794) |
| AAV4 (See SEQ ID NO: 15 in US20140348794) | AAV4 (See SEQ ID NO: 19 in |
| | US20140348794) |
| AAV4 (See SEQ ID NO: 12 in US20140348794) | AAV4 (See SEQ ID NO: 13 in |
| | US20140348794) |
| AAV4 (See SEQ ID NO: 7 in US20140348794) | AAV4 (See SEQ ID NO: 8 in |
| | US20140348794) |
| AAV4 (See SEQ ID NO: 9 in US20140348794) | AAV4 (See SEQ ID NO: 2 in |
| | US20140348794) |
| AAV4 (See SEQ ID NO: 10 in US20140348794) | AAV4 (See SEQ ID NO: 11 in |
| | US20140348794) |
| AAV4 (See SEQ ID NO: 18 in US20140348794) | AAV4 (See SEQ ID NO: 63 in |
| | US20030138772) and US20160017295 SEQ |
| ID NO: (See SEQ ID NO: 4 in US20140348794) | AAV4 (See SEQ ID NO: 16 in |
| | US20140348794) |
| AAV4 (See SEQ ID NO: 20 in US20140348794) | AAV4 (See SEQ ID NO: 6 in |
| | US20140348794) |
| AAV4 (See SEQ ID NO: 1 in US20140348794) | AAV42.2 (See SEQ ID NO: 9 in |
| | US20030138772) |
| AAV42.2 (See SEQ ID NO: 102 in | AAV42.3b (See SEQ ID NO: 36 in |
| US20030138772) | US20030138772) |
| AAV42.3B (See SEQ ID NO: 107 in | AAV42.4 (See SEQ ID NO: 33 in |
| US20030138772) | US20030138772) |
| AAV42.4 (See SEQ ID NO: 88 in | AAV42.8 (See SEQ ID NO: 27 in |
| US20030138772) | US20030138772) |
| AAV42.8 (See SEQ ID NO: 85 in | AAV43.1 (See SEQ ID NO: 39 in |
| US20030138772) | US20030138772) |
| AAV43.1 (See SEQ ID NO: 92 in | AAV43.12 (See SEQ ID NO: 41 in |
| US20030138772) | US20030138772) |
| AAV43.12 (See SEQ ID NO: 93 in | AAV8 (See SEQ ID NO: 15 in |
| US20030138772) | US20150159173) |
| AAV8 (See SEQ ID NO: 7 in US20150376240) | AAV8 (See SEQ ID NO: 4 in |
| | US20030138772; US20150315612 SEQ |
| ID NO: 182 | AAV8 (See SEQ ID NO: 95 in |
| | US20030138772), US20140359799 SEQ |
| AAV8 (See SEQ ID NO: 31 in US20150159173) | AAV8 (See, e.g., SEQ ID NO: 8 in |
| | US20160017295, or SEQ ID NO: 7 in |
| | U.S. Pat. No. 7,198,951, or SEQ ID NO: 223 in |
| | US20150315612) |
| AAV8 (See SEQ ID NO: 8 in US20150376240) | AAV8 (See SEQ ID NO: 214 in |
| | US20150315612) |
| AAV-8b (See SEQ ID NO: 5 in US20150376240) | AAV-8b (See SEQ ID NO: 3 in |
| | US20150376240) |
| AAV-8h (See SEQ ID NO: 6 in US20150376240) | AAV-8h (See SEQ ID NO: 4 in |
| | US20150376240) |
| AAV9 (See SEQ ID NO: 5 in US20030138772) | AAV9 (See SEQ ID NO: 1 in U.S. Pat. No. 7,198,951) |
| AAV9 (See SEQ ID NO: 9 in US20160017295) | AAV9 (See SEQ ID NO: 100 in |
| | US20030138772), U.S. Pat. No. 7198951 SEQ ID NO: 2 |
| | AAV9 (See SEQ ID NO: 3 in U.S. Pat. No. 7,198,951) |
| AAV9 (AAVhu.14) (See SEQ ID NO: 3 in | AAV9 (AAVhu.14) (See SEQ ID NO: 123 in |
| US20150315612) | US20150315612) |
| AAVA3.1 (See SEQ ID NO: 120 in | AAVA3.3 (See SEQ ID NO: 57 in |
| US20030138772) | US20030138772) |
| AAVA3.3 (See SEQ ID NO: 66 in | AAVA3.4 (See SEQ ID NO: 54 in |
| US20030138772) | US20030138772) |
| AAVA3.4 (See SEQ ID NO: 68 in | AAVA3.5 (See SEQ ID NO: 55 in |
| US20030138772) | US20030138772) |
| AAVA3.5 (See SEQ ID NO: 69 in | AAVA3.7 (See SEQ ID NO: 56 in |
| US20030138772) | US20030138772) |
| AAVA3.7 (See SEQ ID NO: 67 in | AAV29. (See SEQ ID NO: 11 in (AAVbb. 1) |
| US20030138772) | 161 US20030138772) |
| AAVC2 (See SEQ ID NO: 61 in US20030138772) | AAVCh.5 (See SEQ ID NO: 46 in |
| | US20150159173); US20150315612 SEQ |
| ID NO: 234 | AAVcy.2 (AAV13.3) (See SEQ ID NO: 15 in |
| | US20030138772) |
| AAV24.1 (See SEQ ID NO: 101 in | AAVcy.3 (AAV24.1) (See SEQ ID NO: 16 in |
| US20030138772) | US20030138772) |
| AAV27.3 (See SEQ ID NO: 104 in | AAVcy.4 (AAV27.3) (See SEQ ID NO: 17 in |
| US20030138772) | US20030138772) |
| AAVcy.5 (See SEQ ID NO: 227 in | AAV7.2 (See SEQ ID NO: 103 in |
| US20150315612) | US20030138772) |
| AAVcy.5 (AAV7.2) (See SEQ ID NO: 18 in | AAV16.3 (See SEQ ID NO: 105 in |
| US20030138772) | US20030138772) |
| AAVcy.6 (AAV16.3) (See SEQ ID NO: 10 in | AAVcy.5 (See SEQ ID NO: 8 in |
| US20030138772) | US20150159173) |
| AAVcy.5 (See SEQ ID NO: 24 in | AAVCy.5Rl (See SEQ ID NO: in |
| US20150159173) | US20150159173 |
| AAVCy.5R2 (See SEQ ID NO: in | AAVCy.5R3 (See SEQ ID NO: in |
| US20150159173) | US20150159173 |
| AAVCy.5R4 (See SEQ ID NO: in | AAVDJ (See SEQ ID NO: 3 in |
| US20150159173) | US20140359799) and SEQ ID NO: 2 in |
| | U.S. Pat. No. 7,588,772) |
| | AAVDJ (See SEQ ID NO: 2 in |
| | US20140359799; and SEQ ID NO: 1 in |
| | U.S. Pat. No. 7,588,772) |
| | AAVDJ-8 (See SEQ ID NO: in U.S. Pat. No. 7,588,772; |
| | Grimm et al 2008 |
| AAVDJ-8 (See SEQ ID NO: in U.S. Pat. No. 7,588,772; | AAVF5 (See SEQ ID NO: 110 in |
| Grimm et al 2008 | US20030138772) |
| AAVH2 (See SEQ ID NO: 26 in US20030138772) | AAVH6 (See SEQ ID NO: 25 in |
| | US20030138772) |
| AAVhEl. 1 (See SEQ ID NO: 44 in U.S. Pat. No. 9,233,131) | AAVhErl.14 (See SEQ ID NO: 46 in |
| | U.S. Pat. No. 9,233,131) |
| AAVhErl.16 (See SEQ ID NO: 48 in U.S. Pat. No. 9,233,131) | AAVhErl.18 (See SEQ ID NO: 49 in |
| | U.S. Pat. No. 9,233,131) |
| AAVhErl.23 (AAVhEr2.29) (See SEQ ID NO: 53 | AAVhErl.35 (See SEQ ID NO: 50 in |
| in U.S. Pat. No. 9,233,131) | U.S. Pat. No. 9,233,131) |
| AAVhErl.36 (See SEQ ID NO: 52 in U.S. Pat. No. 9,233,131) | AAVhEr1.5 (See SEQ ID NO: 45 in |
| | U.S. Pat. No. 9,233,131) |
| AAVhErl.7 (See SEQ ID NO: 51 in U.S. Pat. No. 9,233,131) | AAVhErl.8 (See SEQ ID NO: 47 in |
| | U.S. Pat. No. 9,233,131) |
| AAVhEr2.16 (See SEQ ID NO: 55 in U.S. Pat. No. 9,233,131) | AAVhEr2.30 (See SEQ ID NO: 56 in |
| | U.S. Pat. No. 9,233,131) |
| AAVhEr2.31 (See SEQ ID NO: 58 in U.S. Pat. No. 9,233,131) | AAVhEr2.36 (See SEQ ID NO: 57 in |
| | U.S. Pat. No. 9,233,131) |
| AAVhEr2.4 (See SEQ ID NO: 54 in U.S. Pat. No. 9,233,131) | AAVhEr3.1 (See SEQ ID NO: 59 in |
| | U.S. Pat. No. 9,233,131) |
| AAVhu.l (See SEQ ID NO: 46 in US20150315612) | AAVhu.l (See SEQ ID NO: 144 in |
| | US20150315612) |
| AAVhu.lO (AAV16.8) (See SEQ ID NO: 56 in | AAVhu.lO (AAV16.8) (See SEQ ID NO: 156 |
| US20150315612) | in US20150315612) |
| AAVhu.ll (AAV16.12) (See SEQ ID NO: 57 in | AAVhu.ll (AAV16.12) (See SEQ ID NO: 153 |
| US20150315612) | in US20150315612) |
| AAVhu.12 (See SEQ ID NO: 59 in | AAVhu.12 (See SEQ ID NO: 154 in |
| US20150315612) | US20150315612) |
| AAVhu.13 (See SEQ ID NO: 16 in | |
| US2015015917 and ID NO: 71 in US20150315612) | |
| AAVhu.13 (See SEQ ID NO: 32 in | |
| US20150159173 and ID NO: 129 US20150315612) | |
| AAVhu.136.1 (See SEQ ID NO: 165 in | AAVhu.140.1 (See SEQ ID NO: 166 in |
| US20150315612) | US20150315612) |
| AAVhu.140.2 (See SEQ ID NO: 167 in | AAVhu.145.6 (See SEQ ID NO: 178 in |
| US20150315612) | US20150315612) |
| AAVhu.15 (See SEQ ID NO: 147 in | AAVhu.15 (AAV33.4) (See SEQ ID NO: 50 in |
| US20150315612) | US20150315612) |
| AAVhu.156.1 (See SEQ ID NO: 179 in | AAVhu.16 (See SEQ ID NO: 148 in |
| US20150315612) | US20150315612) |
| AAVhu.l6 (AAV33.8) (See SEQ ID NO: 51 in | AAVhu.17 (See SEQ ID NO: 83 in |
| US20150315612) | US20150315612) |
| AAVhu.l7 (AAV33.12) (See SEQ ID NO: 4 in | AAVhu.172.1 (See SEQ ID NO: 171 in |
| US20150315612) | US20150315612) |
| AAVhu.172.2 (See SEQ ID NO: 172 in | AAVhu.173.4 (See SEQ ID NO: 173 in |
| US20150315612) | US20150315612) |
| AAVhu.173.8 (See SEQ ID NO: 175 in | AAVhu.18 (See SEQ ID NO: 52 in |
| US20150315612) | US20150315612) |
| AAVhu.18 (See SEQ ID NO: 149 in | AAVhu.19 (See SEQ ID NO: 62 in |
| US20150315612) | US20150315612) |
| AAVhu.19 (See SEQ ID NO: 133 in | AAVhu.2 (See SEQ ID NO: 48 in |
| US20150315612) | US20150315612) |
| AAVhu.2 (See SEQ ID NO: 143 in | AAVhu.20 (See SEQ ID NO: 63 in |
| US20150315612) | US20150315612) |
| AAVhu.20 (See SEQ ID NO: 134 in | AAVhu.21 (See SEQ ID NO: 65 in |
| US20150315612) | US20150315612) |
| AAVhu.21 (See SEQ ID NO: 135 in | AAVhu.22 (See SEQ ID NO: 67 in |
| US20150315612) | US20150315612) |
| AAVhu.22 239 (See SEQ ID NO: 138 in | AAVhu.23 (See SEQ ID NO: 60 in |
| US20150315612) | US20150315612) |
| AAVhu.23.2 (See SEQ ID NO: 137 in | AAVhu.24 (See SEQ ID NO: 66 in |
| US20150315612) | US20150315612) |
| AAVhu.24 (See SEQ ID NO: 136 in | AAVhu.25 (See SEQ ID NO: 49 in |
| US20150315612) | US20150315612) |
| AAVhu.25 (See SEQ ID NO: 146 in | AAVhu.26 (See SEQ ID NO: 17 in |
| US20150315612) | US20150159173 and SEQ ID NO: 61 in |
| | US20150315612) |
| | AAVhu.26 (See SEQ ID NO: 33 in |
| | US20150159173), US20150315612 SEQ |
| | AAVhu.27 (See SEQ ID NO: 64 in |
| | US20150315612) |
| AAVhu.27 (See SEQ ID NO: 140 in | AAVhu.28 (See SEQ ID NO: 68 in |
| US20150315612) | US20150315612) |
| AAVhu.28 (See SEQ ID NO: 130 in | AAVhu.29 (See SEQ ID NO: 69 in |
| US20150315612) | US20150315612) |
| AAVhu.29 (See SEQ ID NO: 42 in | |
| US20150159173 and SEQ ID NO: 132 in | |
| US20150315612) | |
| AAVhu.29 (See SEQ ID NO: 225 in | AAVhu.29R (See SEQ ID NO: in |
| US20150315612) | US20150159173 |
| AAVhu.3 (See SEQ ID NO: 44 in | AAVhu.3 (See SEQ ID NO: 145 in |
| US20150315612) | US20150315612) |
| AAVhu.30 (See SEQ ID NO: 70 in | AAVhu.30 (See SEQ ID NO: 131 in |
| US20150315612) | US20150315612) |
| AAVhu.31 (See SEQ ID NO: 1 in | AAVhu.31 (See SEQ ID NO: 121 in |
| US20150315612) | US20150315612) |
| AAVhu.32 (See SEQ ID NO: 2 in | AAVhu.32 (See SEQ ID NO: 122 in |
| US20150315612) | US20150315612) |
| AAVhu.33 (See SEQ ID NO: 75 in | AAVhu.33 (See SEQ ID NO: 124 in |
| US20150315612) | US20150315612) |
| AAVhu.34 (See SEQ ID NO: 72 in | AAVhu.34 (See SEQ ID NO: 125 in |
| US20150315612) | US20150315612) |
| AAVhu.35 (See SEQ ID NO: 73 in | AAVhu.35 (See SEQ ID NO: 164 in |
| US20150315612) | US20150315612) |
| AAVhu.36 (See SEQ ID NO: 74 in | AAVhu.36 (See SEQ ID NO: 126 in |
| US20150315612) | US20150315612) |
| AAVhu.37 (See SEQ ID NO: 34 in | |
| US20150159173 and SEQ ID NO: 88 in | |
| US20150315612) | |
| AAVhu.37 (AAV106.1) (See SEQ ID NO: 10 in | |
| US20150315612 and SEQ ID NO: 18 in | |
| US20150159173) | |
| AAVhu.38 (See SEQ ID NO: 161 in | AAVhu.39 (See SEQ ID NO: 102 in |
| US20150315612) | US20150315612) |
| AAVhu.39 (AAVLG-9) (See SEQ ID NO: 24 in | AAVhu.4 (See SEQ ID NO: 47 in |
| US20150315612) | US20150315612) |
| AAVhu.4 (See SEQ ID NO: 141 in | AAVhu.40 (See SEQ ID NO: 87 in |
| US20150315612) | US20150315612) |
| AAVhu.40 (AAV114.3) (See SEQ ID NO: 11 in | AAVhu.41 (See SEQ ID NO: 91 in |
| US20150315612) | US20150315612) |
| AAVhu.41 (AAV127.2) (See SEQ ID NO: 6 in | AAVhu.42 (See SEQ ID NO: 85 in |
| US20150315612) | US20150315612) |
| AAVhu.42 (AAV127.5) (See SEQ ID NO: 8 in | AAVhu.43 (See SEQ ID NO: 160 in |
| US20150315612) | US20150315612) |
| AAVhu.43 (See SEQ ID NO: 236 in | AAVhu.43 (AAV128.1) (See SEQ ID NO: 80 |
| US20150315612) | in US20150315612) |
| AAVhu.44 (See SEQ ID NO: 45 in | |
| US20150159173 and SEQ ID NO: 158 in | |
| US20150315612) | |
| AAVhu.44 (AAV128.3) (See SEQ ID NO: 81 in | AAVhu.44Rl (See SEQ ID NO: in |
| US20150315612) | US20150159173 |
| AAVhu.44R2 (See SEQ ID NO: in | AAVhu.44R3 (See SEQ ID NO: in |
| US20150159173 | US20150159173 |
| AAVhu.45 (See SEQ ID NO: 76 in | AAVhu.45 (See SEQ ID NO: 127 in |
| US20150315612) | US20150315612) |
| AAVhu.46 (See SEQ ID NO: 82 in | AAVhu.46 (See SEQ ID NO: 159 in |
| US20150315612) | US20150315612) |
| AAVhu.46 (See SEQ ID NO: 224 in | AAVhu.47 (See SEQ ID NO: 77 in |
| US20150315612) | US20150315612) |
| AAVhu.47 (See SEQ ID NO: 128 in | AAVhu.48 (See SEQ ID NO: 38 in |
| US20150315612) | US20150159173) |
| AAVhu.48 (See SEQ ID NO: 157 in | AAVhu.48 (AAV130.4) (See SEQ ID NO: 78 |
| US20150315612) | in US20150315612) |
| AAVhu.48Rl (See SEQ ID NO: in | AAVhu.48R2 (See SEQ ID NO: in |
| US20150159173 | US20150159173 |
| AAVhu.48R3 (See SEQ ID NO: in | AAVhu.49 (See SEQ ID NO: 209 in |
| US20150159173 | US20150315612) |
| AAVhu.49 (See SEQ ID NO: 189 in | AAVhu.5 (See SEQ ID NO: 45 in |
| US20150315612) | US20150315612) |
| AAVhu.5 (See SEQ ID NO: 142 in | AAVhu.51 (See SEQ ID NO: 208 in |
| US20150315612) | US20150315612) |
| AAVhu.51 (See SEQ ID NO: 190 in | AAVhu.52 (See SEQ ID NO: 210 in |
| US20150315612) | US20150315612) |
| AAVhu.52 (See SEQ ID NO: 191 in | AAVhu.53 (See SEQ ID NO: 19 in |
| US20150315612) | US20150159173) |
| AAVhu.53 (See SEQ ID NO: 35 in | AAVhu.53 (AAV145.1) (See SEQ ID NO: 176 |
| US20150159173) | in US20150315612) |
| AAVhu.54 (See SEQ ID NO: 188 in | AAVhu.54 (AAV145.5) (See SEQ ID NO: 177 |
| US20150315612) | in US20150315612) |
| AAVhu.55 (See SEQ ID NO: 187 in | AAVhu.56 (See SEQ ID NO: 205 in |
| US20150315612) | US20150315612) |
| AAVhu.56 (AAV145.6) (See SEQ ID NO: 168 in | AAVhu.56 (AAV145.6) (See SEQ ID NO: 192 |
| US20150315612) | in US20150315612) |
| AAVhu.57 (See SEQ ID NO: 206 in | AAVhu.57 (See SEQ ID NO: 169 in |
| US20150315612) | US20150315612) |
| AAVhu.57 (See SEQ ID NO: 193 in | AAVhu.58 (See SEQ ID NO: 207 in |
| US20150315612) | US20150315612) |
| AAVhu.58 (See SEQ ID NO: 194 in | AAVhu.6 (AAV3.1) (See SEQ ID NO: 5 in |
| US20150315612) | US20150315612) |
| AAVhu.6 (AAV3.1) (See SEQ ID NO: 84 in | AAVhu.60 (See SEQ ID NO: 184 in |
| US20150315612) | US20150315612) |
| AAVhu.60 (AAV161.10) (See SEQ ID NO: 170 in | AAVhu.61 (See SEQ ID NO: 185 in |
| US20150315612) | US20150315612) |
| AAVhu.61 (AAV161.6) (See SEQ ID NO: 174 in | AAVhu.63 (See SEQ ID NO: 204 in |
| US20150315612) | US20150315612) |
| AAVhu.63 (See SEQ ID NO: 195 in | AAVhu.64 (See SEQ ID NO: 212 in |
| US20150315612) | US20150315612) |
| AAVhu.64 (See SEQ ID NO: 196 in | AAVhu.66 (See SEQ ID NO: 197 in |
| US20150315612) | US20150315612) |
| AAVhu.67 (See SEQ ID NO: 215 in | AAVhu.67 (See SEQ ID NO: 198 in |
| US20150315612) | US20150315612) |
| AAVhu.7 (See SEQ ID NO: 226 in | AAVhu.7 (See SEQ ID NO: 150 in |
| US20150315612) | US20150315612) |
| AAVhu.7 (AAV7.3) (See SEQ ID NO: 55 in | AAVhu.71 (See SEQ ID NO: 79 in |
| US20150315612) | US20150315612) |
| AAVhu.8 (See SEQ ID NO: 53 in | AAVhu.8 (See SEQ ID NO: 12 in |
| US20150315612) | US20150315612) |
| AAVhu.8 (See SEQ ID NO: 151 in | AAVhu.9 (AAV3.1) (See SEQ ID NO: 58 in |
| US20150315612) | US20150315612) |
| AAVhu.9 (AAV3.1) (See SEQ ID NO: 155 in | AAV-LK01 (See SEQ ID NO: 2 in |
| US20150315612) | US20150376607) |
| AAV-LK01 (See SEQ ID NO: 29 in | AAV-LK02 (See SEQ ID NO: 3 in |
| US20150376607) | US20150376607) |
| AAV-LK02 (See SEQ ID NO: 30 in | AAV-LK03 (See SEQ ID NO: 4 in |
| US20150376607) | US20150376607) |
| AAV-LK03 (See SEQ ID NO: 12 in | |
| WO2015121501 and SEQ ID NO: 31 in | |
| US20150376607) | |
| AAV-LK04 (See SEQ ID NO: 5 in | AAV-LK04 (See SEQ ID NO: 32 in |
| US20150376607) | US20150376607) |
| AAV-LK05 (See SEQ ID NO: 6 in | AAV-LK05 (See SEQ ID NO: 33 in |
| US20150376607) | US20150376607) |
| AAV-LK06 (See SEQ ID NO: 7 in | AAV-LK06 (See SEQ ID NO: 34 in |
| US20150376607) | US20150376607) |
| AAV-LK07 (See SEQ ID NO: 8 in | AAV-LK07 (See SEQ ID NO: 35 in |
| US20150376607) | US20150376607) |
| AAV-LK08 (See SEQ ID NO: 9 in | AAV-LK08 (See SEQ ID NO: 36 in |
| US20150376607) | US20150376607) |
| AAV-LK09 (See SEQ ID NO: 10 in | AAV-LK09 (See SEQ ID NO: 37 in |
| US20150376607) | US20150376607) |
| AAV-LK10 (See SEQ ID NO: 11 in | AAV-LK10 (See SEQ ID NO: 38 in |
| US20150376607) | US20150376607) |
| AAV-LK11 (See SEQ ID NO: 12 in | AAV-LK11 (See SEQ ID NO: 39 in |
| US20150376607) | US20150376607) |
| AAV-LK12 (See SEQ ID NO: 13 in | AAV-LK12 (See SEQ ID NO: 40 in |
| US20150376607) | US20150376607) |
| AAV-LK13 (See SEQ ID NO: 14 in | AAV-LK13 (See SEQ ID NO: 41 in |
| US20150376607) | US20150376607) |
| AAV-LK14 (See SEQ ID NO: 15 in | AAV-LK14 (See SEQ ID NO: 42 in |
| US20150376607) | US20150376607) |
| AAV-LK15 (See SEQ ID NO: 16 in | AAV-LK15 (See SEQ ID NO: 43 in |
| US20150376607) | US20150376607) |
| AAV-LK16 (See SEQ ID NO: 17 in | AAV-LK16 (See SEQ ID NO: 44 in |
| US20150376607) | US20150376607) |
| AAV-LK17 (See SEQ ID NO: 18 in | AAV-LK17 (See SEQ ID NO: 45 in |
| US20150376607) | US20150376607) |
| AAV-LK18 (See SEQ ID NO: 19 in | AAV-LK18 (See SEQ ID NO: 46 in |
| US20150376607) | US20150376607) |
| AAV-LK19 (See SEQ ID NO: 20 in | AAV-LK19 (See SEQ ID NO: 47 in |
| US20150376607) | US20150376607) |
| AAV-PAEC (See SEQ ID NO: 1 in | AAV-PAEC (See SEQ ID NO: 48 in |
| US20150376607) | US20150376607) |
| AAV-PAEC11 (See SEQ ID NO: 26 in | AAV-PAEC11 (See SEQ ID NO: 54 in |
| US20150376607) | US20150376607) |
| AAV-PAEC 12 (See SEQ ID NO: 27 in | AAV-PAEC 12 (See SEQ ID NO: 51 in |
| US20150376607) | US20150376607) |
| AAV-PAEC 13 (See SEQ ID NO: 28 in | AAV-PAEC 13 (See SEQ ID NO: 49 in |
| US20150376607) | US20150376607) |
| AAV-PAEC2 (See SEQ ID NO: 21 in | AAV-PAEC2 (See SEQ ID NO: 56 in |
| US20150376607) | US20150376607) |
| AAV-PAEC4 (See SEQ ID NO: 22 in | AAV-PAEC4 (See SEQ ID NO: 55 in |
| US20150376607) | US20150376607) |
| AAV-PAEC6 (See SEQ ID NO: 23 in | AAV-PAEC6 (See SEQ ID NO: 52 in |
| US20150376607) | US20150376607) |
| AAV-PAEC7 (See SEQ ID NO: 24 in | AAV-PAEC7 (See SEQ ID NO: 53 in |
| US20150376607) | US20150376607) |
| AAV-PAEC8 (See SEQ ID NO: 25 in | AAV-PAEC8 (See SEQ ID NO: 50 in |
| US20150376607) | US20150376607) |
| AAVpi.l (See SEQ ID NO: 28 in US20150315612) | AAVpi.l (See SEQ ID NO: 93 in |
| | US20150315612; AAVpi.2 408, see SEQ ID |
| | NO: 30 in US20150315612) |
| AAVpi.2 (See SEQ ID NO: 95 in | AAVpi.3 (See SEQ ID NO: 29 in |
| US20150315612) | US20150315612) |
| AAVpi.3 (See SEQ ID NO: 94 in | AAVrh.10 (See SEQ ID NO: 9 in |
| US20150315612) | US20150159173) |
| AAVrh.10 (See SEQ ID NO: 25 in | AAV44.2 (See SEQ ID NO: 59 in |
| US20150159173) | US20030138772) |
| AAVrh.10 (AAV44.2) (See SEQ ID NO: 81 in | AAV42.1B (See SEQ ID NO: 90 in |
| US20030138772) | US20030138772) |
| AAVrh.l2 (AAV42.1b) (See SEQ ID NO: 30 in | AAVrh.13 (See SEQ ID NO: 10 in |
| US20030138772) | US20150159173) |
| AAVrh.13 (See SEQ ID NO: 26 in | AAVrh.13 (See SEQ ID NO: 228 in |
| US20150159173) | US20150315612) |
| AAVrh.l3R (See SEQ ID NO: in US20150159173 | AAV42.3A (See SEQ ID NO: 87 in |
| | US20030138772) |
| AAVrh.l4 (AAV42.3a) (See SEQ ID NO: 32 in | AAV42.5A (See SEQ ID NO: 89 in |
| US20030138772) | US20030138772) |
| AAVrh.l7 (AAV42.5a) (See SEQ ID NO: 34 in | AAV42.5B (See SEQ ID NO: 91 in |
| US20030138772) | US20030138772) |
| AAVrh.l8 (AAV42.5b) (See SEQ ID NO: 29 in | AAV42.6B (See SEQ ID NO: 112 in |
| US20030138772) | US20030138772) |
| AAVrh.l9 (AAV42.6b) (See SEQ ID NO: 38 in | AAVrh.2 (See SEQ ID NO: 39 in |
| US20030138772) | US20150159173) |
| AAVrh.2 (See SEQ ID NO: 231 in | AAVrh.20 (See SEQ ID NO: 1 in |
| US20150315612) | US20150159173) |
| AAV42.10 (See SEQ ID NO: 106 in | AAVrh.21 (AAV42.10) (See SEQ ID NO: 35 |
| US20030138772) | in US20030138772) |
| AAV42.11 (See SEQ ID NO: 108 in | AAVrh.22 (AAV42.11) (See SEQ ID NO: 37 |
| US20030138772) | in US20030138772) |
| AAV42.12 (See SEQ ID NO: 113 in | AAVrh.23 (AAV42.12) (See SEQ ID NO: 58 |
| US20030138772) | in US20030138772) |
| AAV42.13 (See SEQ ID NO: 86 in | AAVrh.24 (AAV42.13) (See SEQ ID NO: 31 |
| US20030138772) | in US20030138772) |
| AAV42.15 (See SEQ ID NO: 84 in | AAVrh.25 (AAV42.15) (See SEQ ID NO: 28 |
| US20030138772) | in US20030138772) |
| AAVrh.2R (See SEQ ID NO: in US20150159173 | AAVrh.31 (AAV223.1) (See SEQ ID NO: 48 |
| | in US20030138772) |
| AAVC1 (See SEQ ID NO: 60 in US20030138772) | AAVrh.32 (AAVC1) (See SEQ ID NO: 19 in |
| | 446 US20030138772) |
| AAVrh.32/33 (See SEQ ID NO: 2 in | AAVrh.51 (AAV2-5) (See SEQ ID NO: 104 in |
| US20150159173) | US20150315612) |
| AAVrh.52 (AAV3-9) (See SEQ ID NO: 18 in | AAVrh.52 (AAV3-9) (See SEQ ID NO: 96 in |
| US20150315612) | US20150315612) |
| AAVrh.53 (See SEQ ID NO: in US20150315612) | AAVrh.53 (AAV3-11) (See SEQ ID NO: 17 in |
| | US20150315612) |
| AAVrh.53 (AAV3-11) (See SEQ ID NO: 186 in | AAVrh.54 (See SEQ ID NO: 40 in |
| US20150315612) | US20150315612) |
| AAVrh.54 (See SEQ ID NO: 49 in | |
| US20150159173 and SEQ ID NO: 116 in | |
| US20150315612) | |
| AAVrh.55 (See SEQ ID NO: 37 in | AAVrh.55 (AAV4-19) (See SEQ ID NO: 117 |
| US20150315612) | in US20150315612) |
| AAVrh.56 (See SEQ ID NO: 54 in | AAVrh.56 (See SEQ ID NO: 152 in |
| US20150315612) | US20150315612) |
| AAVrh.57 (See SEQ ID NO: in 497 | AAVrh.57 (See SEQ ID NO: 105 in |
| US20150315612 SEQ ID NO: 26 | US20150315612) |
| AAVrh.58 (See SEQ ID NO: 27 in | AAVrh.58 (See SEQ ID NO: 48 in |
| US20150315612) | US20150159173 and SEQ ID NO: 106 in |
| | US20150315612) |
| | AAVrh.58 (See SEQ ID NO: 232 in |
| | US20150315612) |
| AAVrh.59 (See SEQ ID NO: 42 in | AAVrh.59 (See SEQ ID NO: 110 in |
| US20150315612) | US20150315612) |
| AAVrh.60 (See SEQ ID NO: 31 in | AAVrh.60 (See SEQ ID NO: 120 in |
| US20150315612) | US20150315612) |
| AAVrh.61 (See SEQ ID NO: 107 in | AAVrh.61 (AAV2-3) (See SEQ ID NO: 21 in |
| US20150315612) | US20150315612) |
| AAVrh.62 (AAV2-15) (See SEQ ID NO: 33 in | AAVrh.62 (AAV2-15) (See SEQ ID NO: 114 |
| US20150315612) | in US20150315612) |
| AAVrh.64 (See SEQ ID NO: 15 in | AAVrh.64 (See SEQ ID NO: 43 in |
| US20150315612) | US20150159173 and SEQ ID NO: 99 in |
| | US20150315612) |
| | AAVrh.64 (See SEQ ID NO: 233 in |
| | US20150315612) |
| AAVRh.64Rl (See SEQ ID NO: in | AAVRh.64R2 (See SEQ ID NO: in |
| US20150159173 | US20150159173 |
| AAVrh.65 (See SEQ ID NO: 35 in | AAVrh.65 (See SEQ ID NO: 112 in |
| US20150315612) | US20150315612) |
| AAVrh.67 (See SEQ ID NO: 36 in | AAVrh.67 (See SEQ ID NO: 230 in |
| US20150315612) | US20150315612) |
| AAVrh.67 (See SEQ ID NO: 47 in | |
| US20150159173 and SEQ ID NO: 47 in | |
| US20150315612) | |
| AAVrh.68 (See SEQ ID NO: 16 in | AAVrh.68 (See SEQ ID NO: 100 in |
| US20150315612) | US20150315612) |
| AAVrh.69 (See SEQ ID NO: 39 in | AAVrh.69 (See SEQ ID NO: 119 in |
| US20150315612) | US20150315612) |
| AAVrh.70 (See SEQ ID NO: 20 in | AAVrh.70 (See SEQ ID NO: 98 in |
| US20150315612) | US20150315612) |
| AAVrh.71 (See SEQ ID NO: 162 in | AAVrh.72 (See SEQ ID NO: 9 in |
| US20150315612) | US20150315612) |
| AAVrh.73 (See SEQ ID NO: 5 in | AAVrh.74 (See SEQ ID NO: 6 in |
| US20150159173) | US20150159173) |
| AAVrh.8 (See SEQ ID NO: 41 in | AAVrh.8 (See SEQ ID NO: 235 in |
| US20150159173) | US20150315612) |
| AAVrh.8R (See SEQ ID NO: 9 in | AAVrh.8R A586R mutant (See SEQ ID NO: 10 |
| US20150159173, WO2015168666) | in WO2015168666) |
| AAVrh.8R R533A mutant (See SEQ ID NO: 11 in | BAAV (bovine AAV) (See SEQ ID NO: 8 in |
| WO2015168666) | U.S. Pat. No. 9,193,769) |
| BAAV (bovine AAV) (See SEQ ID NO: 10 in | BAAV (bovine AAV) (See SEQ ID NO: 4 in |
| U.S. Pat. No. 9,193,769) | U.S. Pat. No. 9,193,769) |
| BAAV (bovine AAV) (See SEQ ID NO: 2 in | BAAV (bovine AAV) (See SEQ ID NO: 6 in |
| U.S. Pat. No. 9,193,769) | U.S. Pat. No. 9,193,769) |
| BAAV (bovine AAV) (See SEQ ID NO: 1 in | BAAV (bovine AAV) (See SEQ ID NO: 5 in |
| U.S. Pat. No. 9,193,769) | U.S. Pat. No. 9,193,769) |
| BAAV (bovine AAV) (See SEQ ID NO: 3 in | BAAV (bovine AAV) (See SEQ ID NO: 11 in |
| U.S. Pat. No. 9,193,769) | U.S. Pat. No. 9,193,769) |
| BAAV (bovine AAV) (See SEQ ID NO: 5 in | BAAV (bovine AAV) (See SEQ ID NO: 6 in |
| U.S. Pat. No. 7,427,396) | U.S. Pat. No. 7,427,396) |
| BAAV (bovine AAV) (See SEQ ID NO: 7 in | BAAV (bovine AAV) (See SEQ ID NO: 9 in |
| U.S. Pat. No. 9,193,769) | U.S. Pat. No. 9,193,769) |
| BNP61 AAV (See SEQ ID NO: 1 in | BNP61 AAV (See SEQ ID NO: 2 in |
| US20150238550) | US20150238550) |
| BNP62 AAV (See SEQ ID NO: 3 in | BNP63 AAV (See SEQ ID NO: 4 in |
| US20150238550) | US20150238550) |
| caprine AAV (See SEQ ID NO: 3 in U.S. Pat. No. 7,427,396) | caprine AAV (See SEQ ID NO: 4 in |
| | U.S. Pat. No. 7,427,396) |
| true type AAV (ttAAV) (See SEQ ID NO: 2 in | AAAV (Avian AAV) (See SEQ ID NO: 12 in |
| WO2015121501) | U.S. Pat. No. 9,238,800) |
| AAAV (Avian AAV) (See SEQ ID NO: 2 in | AAAV (Avian AAV) (See SEQ ID NO: 6 in |
| U.S. Pat. No. 9,238,800) | U.S. Pat. No. 9,238,800) |
| AAAV (Avian AAV) (See SEQ ID NO: 4 in | AAAV (Avian AAV) (See SEQ ID NO: 8 in |
| U.S. Pat. No. 9,238,800) | U.S. Pat. No. 9,238,800) |
| AAAV (Avian AAV) (See SEQ ID NO: 14 in | AAAV (Avian AAV) (See SEQ ID NO: 10 in |
| U.S. Pat. No. 9,238,800) | U.S. Pat. No. 9,238,800) |
| AAAV (Avian AAV) (See SEQ ID NO: 15 in | AAAV (Avian AAV) (See SEQ ID NO: 5 in |
| U.S. Pat. No. 9,238,800) | U.S. Pat. No. 9,238,800) |
| AAAV (Avian AAV) (See SEQ ID NO: 9 in | AAAV (Avian AAV) (See SEQ ID NO: 3 in |
| U.S. Pat. No. 9,238,800) | U.S. Pat. No. 9,238,800) |
| AAAV (Avian AAV) (See SEQ ID NO: 7 in | AAAV (Avian AAV) (See SEQ ID NO: 11 in |
| U.S. Pat. No. 9,238,800) | U.S. Pat. No. 9,238,800) |
| AAAV (Avian AAV) (See SEQ ID NO: in | AAAV (Avian AAV) (See SEQ ID NO: 1 in |
| U.S. Pat. No. 9,238,800) | U.S. Pat. No. 9,238,800) |
| AAV Shuffle 100-1 (See SEQ ID NO: 23 in | AAV Shuffle 100-1 (See SEQ ID NO: 11 in |
| US20160017295) | US20160017295) |
| AAV Shuffle 100-2 (See SEQ ID NO: 37 in | AAV Shuffle 100-2 (See SEQ ID NO: 29 in |
| US20160017295) | US20160017295) |
| AAV Shuffle 100-3 (See SEQ ID NO: 24 in | AAV Shuffle 100-3 (See SEQ ID NO: 12 in |
| US20160017295) | US20160017295) |
| AAV Shuffle 100-7 (See SEQ ID NO: 25 in | AAV Shuffle 100-7 (See SEQ ID NO: 13 in |
| US20160017295) | US20160017295) |
| AAV Shuffle 10-2 (See SEQ ID NO: 34 in | AAV Shuffle 10-2 (See SEQ ID NO: 26 in |
| US20160017295) | US20160017295) |
| AAV Shuffle 10-6 (See SEQ ID NO: 35 in | AAV Shuffle 10-6 (See SEQ ID NO: 27 in |
| US20160017295) | US20160017295) |
| AAV Shuffle 10-8 (See SEQ ID NO: 36 in | AAV Shuffle 10-8 (See SEQ ID NO: 28 in |
| US20160017295) | US20160017295) |
| AAV SM 100-10 (See SEQ ID NO: 41 in | AAV SM 100-10 (See SEQ ID NO: 33 in |
| US20160017295) | US20160017295) |
| AAV SM 100-3 (See SEQ ID NO: 40 in | AAV SM 100-3 (See SEQ ID NO: 32 in |
| US20160017295) | US20160017295) |
| AAV SM 10-1 (See SEQ ID NO: 38 in | AAV SM 10-1 (See SEQ ID NO: 30 in |
| US20160017295) | US20160017295) |
| AAV SM 10-2 (See SEQ ID NO: 10 in | AAV SM 10-2 (See SEQ ID NO: 22 in |
| US20160017295) | US20160017295) |
| AAV SM 10-8 (See SEQ ID NO: 39 in | AAV SM 10-8 (See SEQ ID NO: 31 in |
| US20160017295) | US20160017295) |
| AAV CBr-7.1 (See SEQ ID NO: 4 in | AAV CBr-7.1 (See SEQ ID NO: 54 in |
| WO2016065001) | WO2016065001) |
| AAV CBr-7.10 (See SEQ ID NO: 11 in | AAV CBr-7.10 (See SEQ ID NO: 61 in |
| WO2016065001) | WO2016065001) |
| AAV CBr-7.2 (See SEQ ID NO: 5 in | AAV CBr-7.2 (See SEQ ID NO: 55 in |
| WO2016065001) | WO2016065001) |
| AAV CBr-7.3 (See SEQ ID NO: 6 in | AAV CBr-7.3 (See SEQ ID NO: 56 in |
| WO2016065001) | WO2016065001) |
| AAV CBr-7.4 (See SEQ ID NO: 7 in | AAV CBr-7.4 (See SEQ ID NO: 57 in |
| WO2016065001) | WO2016065001) |
| AAV CBr-7.5 (See SEQ ID NO: 8 in | AAV CHt-6.6 (See SEQ ID NO: 35 in |
| WO2016065001) | WO2016065001) |
| AAV CHt-6.6 (See SEQ ID NO: 85 in | AAV CHt-6.7 (See SEQ ID NO: 36 in |
| WO2016065001) | WO2016065001) |
| AAV CHt-6.7 (See SEQ ID NO: 86 in | AAV CHt-6.8 (See SEQ ID NO: 37 in |
| WO2016065001) | WO2016065001) |
| AAV CHt-6.8 (See SEQ ID NO: 87 in | AAV CHt-Pl (See SEQ ID NO: 29 in |
| WO2016065001) | WO2016065001) |
| AAV CHt-Pl (See SEQ ID NO: 79 in | AAV CHt-P2 (See SEQ ID NO: 1 in |
| WO2016065001) | WO2016065001) |
| AAV CHt-P2 (See SEQ ID NO: 51 in | AAV CHt-P5 (See SEQ ID NO: 2 in |
| WO2016065001) | WO2016065001) |
| AAV CHt-P5 (See SEQ ID NO: 52 in | AAV CHt-P6 (See SEQ ID NO: 30 in |
| WO2016065001) | WO2016065001) |
| AAV CHt-P6 (See SEQ ID NO: 80 in | AAV CHt-P8 (See SEQ ID NO: 31 in |
| WO2016065001) | WO2016065001) |
| AAV CHt-P8 (See SEQ ID NO: 81 in | AAV CHt-P9 (See SEQ ID NO: 3 in |
| WO2016065001) | WO2016065001) |
| AAV CHt-P9 (See SEQ ID NO: 53 in | AAV CKd-1 (See SEQ ID NO: 57 in |
| WO2016065001) | U.S. Pat. No. 8,734,809) |
| AAV CKd-1 (See SEQ ID NO: 131 in | AAV CKd-10 (See SEQ ID NO: 58 in |
| U.S. Pat. No. 8,734,809) | U.S. Pat. No. 8,734,809) |
| AAV CKd-10 (See SEQ ID NO: 132 in | AAV CKd-2 (See SEQ ID NO: 59 in |
| U.S. Pat. No. 8,734,809) | U.S. Pat. No. 8,734,809) |
| AAV CKd-2 (See SEQ ID NO: 133 in | AAV CKd-3 (See SEQ ID NO: 60 in |
| U.S. Pat. No. 8,734,809) | U.S. Pat. No. 8,734,809) |
| AAV CKd-3 (See SEQ ID NO: 134 in | AAV CKd-4 (See SEQ ID NO: 61 in |
| U.S. Pat. No. 8,734,809) | U.S. Pat. No. 8,734,809) |
| AAV CKd-4 (See SEQ ID NO: 135 in | AAV CKd-6 (See SEQ ID NO: 62 in |
| U.S. Pat. No. 8,734,809) | U.S. Pat. No. 8,734,809) |
| AAV CKd-6 (See SEQ ID NO: 136 in | AAV CKd-7 (See SEQ ID NO: 63 in |
| U.S. Pat. No. 8,734,809) | U.S. Pat. No. 8,734,809) |
| AAV CKd-7 (See SEQ ID NO: 137 in | AAV CKd-8 (See SEQ ID NO: 64 in |
| U.S. Pat. No. 8,734,809) | U.S. Pat. No. 8,734,809) |
| AAV CKd-8 (See SEQ ID NO: 138 in | AAV CKd-B 1 (See SEQ ID NO: 73 in |
| U.S. Pat. No. 8,734,809) | U.S. Pat. No. 8,734,809) |
| AAV CKd-B 1 (See SEQ ID NO: 147 in | AAV CKd-B2 (See SEQ ID NO: 74 in |
| U.S. Pat. No. 8,734,809) | U.S. Pat. No. 8,734,809) |
| AAV CKd-B2 (See SEQ ID NO: 148 in | AAV CKd-B3 (See SEQ ID NO: 75 in |
| U.S. Pat. No. 8,734,809) | U.S. Pat. No. 8,734,809) |
| AAV CKd-B3 (See SEQ ID NO: in U.S. Pat. No. 8,734,809 | AAV CKd-B3 (See SEQ ID NO: 149 in |
| | U.S. Pat. No. 8,734,809) |
| AAV CLv-1 (See SEQ ID NO: 65 in U.S. Pat. No. 8,734,809) | AAV CLv-1 (See SEQ ID NO: 139 in |
| | U.S. Pat. No. 8,734,809) |
| AAV CLvl-1 (See SEQ ID NO: 171 in | AAV Civ 1-10 (See SEQ ID NO: 178 in |
| U.S. Pat. No. 8,734,809) | U.S. Pat. No. 8,734,809) |
| AAV CLvl-2 (See SEQ ID NO: 172 in | AAV CLv-12 (See SEQ ID NO: 66 in |
| U.S. Pat. No. 8,734,809) | U.S. Pat. No. 8,734,809) |
| AAV CLv-12 (See SEQ ID NO: 140 in | AAV CLvl-3 (See SEQ ID NO: 173 in |
| U.S. Pat. No. 8,734,809) | U.S. Pat. No. 8,734,809) |
| AAV CLv-13 (See SEQ ID NO: 67 in | AAV CLv-13 (See SEQ ID NO: 141 in |
| U.S. Pat. No. 8,734,809) | U.S. Pat. No. 8,734,809) |
| AAV CLvl-4 (See SEQ ID NO: 174 in | AAV Civ 1-7 (See SEQ ID NO: 175 in |
| U.S. Pat. No. 8,734,809) | U.S. Pat. No. 8,734,809) |
| AAV Civ 1-8 (See SEQ ID NO: 176 in | AAV Civ 1-9 (See SEQ ID NO: 177 in |
| U.S. Pat. No. 8,734,809) | U.S. Pat. No. 8,734,809) |
| AAV CLv-2 (See SEQ ID NO: 68 in U.S. Pat. No. 8,734,809) | AAV CLv-2 (See SEQ ID NO: 142 in |
| | U.S. Pat. No. 8,734,809) |
| AAV CLv-3 (See SEQ ID NO: 69 in U.S. Pat. No. 8,734,809) | AAV CLv-3 (See SEQ ID NO: 143 in |
| | U.S. Pat. No. 8,734,809) |
| AAV CLv-4 (See SEQ ID NO: 70 in U.S. Pat. No. 8,734,809) | AAV CLv-4 (See SEQ ID NO: 144 in |
| | U.S. Pat. No. 8,734,809) |
| AAV CLv-6 (See SEQ ID NO: 71 in U.S. Pat. No. 8,734,809) | AAV CLv-6 (See SEQ ID NO: 145 in |
| | U.S. Pat. No. 8,734,809) |
| AAV CLv-8 (See SEQ ID NO: 72 in U.S. Pat. No. 8,734,809) | AAV CLv-8 (See SEQ ID NO: 146 in |
| | U.S. Pat. No. 8,734,809) |
| AAV CLv-Dl (See SEQ ID NO: 22 in | AAV CLv-Dl (See SEQ ID NO: 96 in |
| U.S. Pat. No. 8,734,809) | U.S. Pat. No. 8,734,809) |
| AAV CLv-D2 (See SEQ ID NO: 23 in | AAV CLv-D2 (See SEQ ID NO: 97 in |
| U.S. Pat. No. 8,734,809) | U.S. Pat. No. 8,734,809) |
| AAV CLv-D3 (See SEQ ID NO: 24 in | AAV CLv-D3 (See SEQ ID NO: 98 in |
| U.S. Pat. No. 8,734,809) | U.S. Pat. No. 8,734,809) |
| AAV CLv-D4 (See SEQ ID NO: 25 in | AAV CLv-D4 (See SEQ ID NO: 99 in |
| U.S. Pat. No. 8,734,809) | U.S. Pat. No. 8,734,809) |
| AAV CLv-D5 (See SEQ ID NO: 26 in | AAV CLv-D5 (See SEQ ID NO: 100 in |
| U.S. Pat. No. 8,734,809) | U.S. Pat. No. 8,734,809) |
| AAV CLv-D6 (See SEQ ID NO: 27 in | AAV CLv-D6 (See SEQ ID NO: 101 in |
| U.S. Pat. No. 8,734,809) | U.S. Pat. No. 8,734,809) |
| AAV CLv-D7 (See SEQ ID NO: 28 in | AAV CLv-D7 (See SEQ ID NO: 102 in |
| U.S. Pat. No. 8,734,809) | U.S. Pat. No. 8,734,809) |
| AAV CLv-D8 (See SEQ ID NO: 29 in | AAV CLv-D8 (See SEQ ID NO: 103 in |
| U.S. Pat. No. 8,734,809) | U.S. Pat. No. 8734809); AAV CLv-Kl 762, see SEQ ID |
| | NO: 18 in WO2016065001) |
| AAV CLv-Kl (See SEQ ID NO: 68 in | AAV CLv-K3 (See SEQ ID NO: 19 in |
| WO2016065001) | WO2016065001) |
| AAV CLv-K3 (See SEQ ID NO: 69 in | AAV CLv-K6 (See SEQ ID NO: 20 in |
| WO2016065001) | WO2016065001) |
| AAV CLv-K6 (See SEQ ID NO: 70 in | AAV CLv-L4 (See SEQ ID NO: 15 in |
| WO2016065001) | WO2016065001) |
| AAV CLv-L4 (See SEQ ID NO: 65 in | AAV CLv-L5 (See SEQ ID NO: 16 in |
| WO2016065001) | WO2016065001) |
| AAV CLv-L5 (See SEQ ID NO: 66 in | AAV CLv-L6 (See SEQ ID NO: 17 in |
| WO2016065001) | WO2016065001) |
| AAV CLv-L6 (See SEQ ID NO: 67 in | AAV CLv-Ml (See SEQ ID NO: 21 in |
| WO2016065001) | WO2016065001) |
| AAV CLv-Ml (See SEQ ID NO: 71 in | AAV CLv-Mll (See SEQ ID NO: 22 in |
| WO2016065001) | WO2016065001) |
| AAV CLv-Ml 1 (See SEQ ID NO: 72 in | AAV CLv-M2 (See SEQ ID NO: 23 in |
| WO2016065001) | WO2016065001) |
| AAV CLv-M2 (See SEQ ID NO: 73 in | AAV CLv-M5 (See SEQ ID NO: 24 in |
| WO2016065001) | WO2016065001) |
| AAV CLv-M5 (See SEQ ID NO: 74 in | AAV CLv-M6 (See SEQ ID NO: 25 in |
| WO2016065001) | WO2016065001) |
| AAV CLv-M6 (See SEQ ID NO: 75 in | AAV CLv-M7 (See SEQ ID NO: 26 in |
| WO2016065001) | WO2016065001) |
| AAV CLv-M7 (See SEQ ID NO: 76 in | AAV CLv-M8 (See SEQ ID NO: 27 in |
| WO2016065001) | WO2016065001) |
| AAV CLv-M8 (See SEQ ID NO: 77 in | AAV CLv-M9 (See SEQ ID NO: 28 in |
| WO2016065001) | WO2016065001) |
| AAV CLv-M9 (See SEQ ID NO: 78 in | AAV CLv-Rl (See SEQ ID NO: 30 in |
| WO2016065001) | U.S. Pat. No. 8,734,809) |
| AAV CLv-Rl (See SEQ ID NO: 104 in | AAV CLv-R2 (See SEQ ID NO: 31 in |
| U.S. Pat. No. 8,734,809) | U.S. Pat. No. 8,734,809) |
| AAV CLv-R2 (See SEQ ID NO: 105 in | AAV CLv-R3 (See SEQ ID NO: 32 in |
| U.S. Pat. No. 8,734,809) | U.S. Pat. No. 8,734,809) |
| AAV CLv-R3 (See SEQ ID NO: 106 in | AAV CLv-R4 (See SEQ ID NO: 33 in |
| U.S. Pat. No. 8,734,809) | U.S. Pat. No. 8,734,809) |
| AAV CLv-R4 (See SEQ ID NO: 107 in | AAV CLv-R5 (See SEQ ID NO: 34 in |
| U.S. Pat. No. 8,734,809) | U.S. Pat. No. 8,734,809) |
| AAV CLv-R5 (See SEQ ID NO: 108 in | AAV CLv-R6 (See SEQ ID NO: 35 in |
| U.S. Pat. No. 8,734,809) | U.S. Pat. No. 8,734,809) |
| AAV CLv-R6 (See SEQ ID NO: 109 in | AAV CLv-R7 (See SEQ ID NO: 110 in |
| U.S. Pat. No. 8734809); AAV CLv-R7 802 (see SEQ ID NO: | U.S. Pat. No. 8,734,809) |
| 36 in U.S. Pat. No. 8,734,809) | |
| AAV CLv-R8 (See SEQ ID NO: 37 in | AAV CLv-R8 (See SEQ ID NO: 111 in |
| U.S. Pat. No. 8,734,809) | U.S. Pat. No. 8,734,809) |
| AAV CLv-R9 (See SEQ ID NO: 38 in | AAV CLv-R9 (See SEQ ID NO: 112 in |
| U.S. Pat. No. 8,734,809) | U.S. Pat. No. 8,734,809) |
| AAV CSp-1 (See SEQ ID NO: 45 in U.S. Pat. No. 8,734,809) | AAV CSp-1 (See SEQ ID NO: 119 in |
| | U.S. Pat. No. 8,734,809) |
| AAV CSp-10 (See SEQ ID NO: 46 in U.S. Pat. No. 8,734,809) | AAV CSp-10 (See SEQ ID NO: 120 in |
| | U.S. Pat. No. 8,734,809) |
| AAV CSp-11 (See SEQ ID NO: 47 in U.S. Pat. No. 8,734,809) | AAV CSp-11 (See SEQ ID NO: 121 in |
| | U.S. Pat. No. 8,734,809) |
| AAV CSp-2 (See SEQ ID NO: 48 in U.S. Pat. No. 8,734,809) | AAV CSp-2 (See SEQ ID NO: 122 in |
| | U.S. Pat. No. 8,734,809) |
| AAV CSp-3 (See SEQ ID NO: 49 in U.S. Pat. No. 8,734,809) | AAV CSp-3 (See SEQ ID NO: 123 in |
| | U.S. Pat. No. 8,734,809) |
| AAV CSp-4 (See SEQ ID NO: 50 in U.S. Pat. No. 8,734,809) | AAV CSp-4 (See SEQ ID NO: 124 in |
| | U.S. Pat. No. 8,734,809) |
| AAV CSp-6 (See SEQ ID NO: 51 in U.S. Pat. No. 8,734,809) | AAV CSp-6 (See SEQ ID NO: 125 in |
| | U.S. Pat. No. 8,734,809) |
| AAV CSp-7 (See SEQ ID NO: 52 in U.S. Pat. No. 8,734,809) | AAV CSp-7 (See SEQ ID NO: 126 in |
| | U.S. Pat. No. 8,734,809) |
| AAV CSp-8 (See SEQ ID NO: 53 in U.S. Pat. No. 8,734,809) | AAV CSp-8 (See SEQ ID NO: 127 in |
| | U.S. Pat. No. 8,734,809) |
| AAV CSp-8.10 (See SEQ ID NO: 38 in | AAV CSp-8.10 (See SEQ ID NO: 88 in |
| WO2016065001) | WO2016065001) |
| AAV CSp-8.2 (See SEQ ID NO: 39 in | AAV CSp-8.2 (See SEQ ID NO: 89 in |
| WO2016065001) | WO2016065001) |
| AAV CSp-8.4 (See SEQ ID NO: 40 in | AAV CSp-8.4 (See SEQ ID NO: 90 in |
| WO2016065001) | WO2016065001) |
| AAV CSp-8.5 (See SEQ ID NO: 41 in | AAV CSp-8.5 (See SEQ ID NO: 91 in |
| WO2016065001) | WO2016065001) |
| AAV CSp-8.6 (See SEQ ID NO: 42 in | AAV CSp-8.6 (See SEQ ID NO: 92 in |
| WO2016065001) | WO2016065001) |
| AAV CSp-8.7 (See SEQ ID NO: 43 in | AAV CSp-8.7 (See SEQ ID NO: 93 in |
| WO2016065001) | WO2016065001) |
| AAV CSp-8.8 (See SEQ ID NO: 44 in | AAV CSp-8.8 (See SEQ ID NO: 94 in |
| WO2016065001) | WO2016065001) |
| AAV CSp-8.9 (See SEQ ID NO: 45 in | AAV CSp-8.9 (See SEQ ID NO: 95 in |
| WO2016065001) | WO2016065001) |
| AAV CSp-9 842 (See SEQ ID NO: 54 in | AAV CSp-9 (See SEQ ID NO: 128 in |
| U.S. Pat. No. 8,734,809) | U.S. Pat. No. 8,734,809) |
| AAV.hu.48R3 (See SEQ ID NO: 183 in | AAV.VR-355 (See SEQ ID NO: 181 in |
| U.S. Pat. No. 8,734,809) | U.S. Pat. No. 8,734,809) |
| AAV3B (See SEQ ID NO: 48 in WO2016065001) | AAV3B (See SEQ ID NO: 98 in |
| | WO2016065001) |
| AAV4 (See SEQ ID NO: 49 in WO2016065001) | AAV4 (See SEQ ID NO: 99 in |
| | WO2016065001) |
| AAV5 (See SEQ ID NO: 50 in WO2016065001) | AAV5 (See SEQ ID NO: 100 in |
| | WO2016065001) |
| AAVF1/HSC1 (See SEQ ID NO: 20 in | AAVF1/HSC1 (See SEQ ID NO: 2 in |
| WO2016049230) | WO2016049230) |
| AAVF11/HSC11 (See SEQ ID NO: 26 in | AAVF11/HSC11 (See SEQ ID NO: 4 in |
| WO2016049230) | WO2016049230) |
| AAVF12/HSC12 (See SEQ ID NO: 30 in | AAVF12/HSC12 (See SEQ ID NO: 12 in |
| WO2016049230) | WO2016049230) |
| AAVF13/HSC13 (See SEQ ID NO: 31 in | AAVF13/HSC13 (See SEQ ID NO: 14 in |
| WO2016049230) | WO2016049230) |
| AAVF14/HSC14 (See SEQ ID NO: 32 in | AAVF14/HSC14 (See SEQ ID NO: 15 in |
| WO2016049230) | WO2016049230) |
| AAVF15/HSC15 (See SEQ ID NO: 33 in | AAVF15/HSC15 (See SEQ ID NO: 16 in |
| WO2016049230) | WO2016049230) |
| AAVF16/HSC16 (See SEQ ID NO: 34 in | AAVF16/HSC16 (See SEQ ID NO: 17 in |
| WO2016049230) | WO2016049230) |
| AAVF17/HSC17 (See SEQ ID NO: 35 in | AAVF17/HSC17 (See SEQ ID NO: 13 in |
| WO2016049230) | WO2016049230) |
| AAVF2/HSC2 (See SEQ ID NO: 21 in | AAVF2/HSC2 (See SEQ ID NO: 3 in |
| WO2016049230) | WO2016049230) |
| AAVF3/HSC3 (See SEQ ID NO: 22 in | AAVF3/HSC3 (See SEQ ID NO: 5 in |
| WO2016049230) | WO2016049230) |
| AAVF4/HSC4 (See SEQ ID NO: 23 in | AAVF4/HSC4 (See SEQ ID NO: 6 in |
| WO2016049230) | WO2016049230) |
| AAVF5/HSC5 (See SEQ ID NO: 25 in | AAVF5/HSC5 (See SEQ ID NO: 11 in |
| WO2016049230) | WO2016049230) |
| AAVF6/HSC6 (See SEQ ID NO: 24 in | AAVF6/HSC6 (See SEQ ID NO: 7 in |
| WO2016049230) | WO2016049230) |
| AAVF7/HSC7 (See SEQ ID NO: 27 in | AAVF7/HSC7 (See SEQ ID NO: 8 in |
| WO2016049230) | WO2016049230) |
| AAVF8/HSC8 (See SEQ ID NO: 28 in | AAVF8/HSC8 (See SEQ ID NO: 9 in |
| WO2016049230) | WO2016049230) |
| AAVF9/HSC9 (See SEQ ID NO: 10 in | AAVF9/HSC9 882 (see SEQ ID NO: 29 in |
| WO2016049230) | WO2016049230) |

[0332] In one embodiment, the AAV vector (also referred to as a rAAV virion) as disclosed herein comprises a capsid protein from any of those disclosed in WO2019/241324, which is specifically incorporated herein in its entirety by reference. In some embodiments of the invention described herein, the rAAV vector comprises a liver specific capsid, e.g., a liver specific capsid selected from XL32 and XL32.1, as disclosed in WO2019/241324, which is incorporated herein in its entirety by reference. In some embodiments, the rAAV vector is a AAVXL32 or AAVXL32.1 as disclosed in WO2019/241324, which is incorporated herein in its entirety by reference.

[0333] Exemplary chimeric or variant capsid proteins that can be used as the AAV capsid in the rAAV vector described herein can be selected from Table 2 from U.S. provisional application 62,937,556, filed on Nov. 19, 2019, which is specifically incorporated herein in its reference, or can be used with any combination with wild type capsid proteins and/or other chimeric or variant capsid proteins now known or later identified and each is incorporated herein. In some embodiments, the rAAV vector encompassed for use is a chimeric vector, e.g., as disclosed in 9,012,224 and U.S. Pat. No. 7,892,809, which are incorporated herein in their entirety by reference.

[0334] In some embodiments, the rAAV vector is a haploid rAAV vector, as disclosed in US application US2018/0371496 and PCT/US18/22725, or polyploid rAAV vector, e.g., as disclosed in PCT/US2018/044632 filed on Jul. 31, 2018 and in U.S. application Ser. No. 16/151,110, each of which are incorporated herein in their entirety by reference. In some embodiments, the rAAV vector is a rAAV3 vector, as disclosed in 9,012,224 and WO 2017/106236 which are incorporated herein in their entirety by reference.

[0335] In a particular embodiment, the rAAV is a AAVXL32 or AAVXL32.1 AAV vector as disclosed in WO2019/241324, which is incorporated herein in its entirety by reference. In some embodiments, the rAAV vector comprises a capsid disclosed in WO2019241324A1, or International Patent application PCT/US2019/036676, which are incorporated herein in their entirety by reference. In some embodiments, the AAV vector is a AAV8 vector or a rational haploid comprising an AAV8 capsid protein. In some embodiments, the recombinant AAV vector is a chimeric AAV vector, haploid AAV vector, a hybrid AAV vector or polyploid AAV vector. In some embodiments, the recombinant AAV vector is a rational haploid vector, a mosaic AAV vector, a chemically modified AAV vector, or a AAV vector from any AAV serotypes, for example, from any AAV serotype disclosed in Table 1 as disclosed in International Applications WO2020/102645, and WO2020/102667, each of which are incorporated herein in their entirety.

[0336] In an embodiment, an rAAV vector useful in the treatment of Pompe Disease as disclosed herein is an AAV3b capsid. AAV3b capsids encompassed for use are described in 2017/106236, and 9,012,224 and 7,892,809, and International application PCT/US19/61653, filed Nov. 15, 2019, and International Applications WO2020/102645, and WO2020/102667, each of which are incorporated herein in their entirety. In addition, AAV3b capsids of the AAV vector for use according to the methods as disclosed herein are disclosed in International Patent Applications WO 2020/102645 and WO2021102107, which are incorporated herien in its entirity by reference herein.

[0337] In some embodiments, the AAV3b capsid comprises SEQ ID NO: 44 as disclosed in International Patent Applications WO 2020/102645 and WO2021102107. In an embodiment, the AAV capsid used in the treatment of Pompe Disease can be a modified AAV capsid that is derived in whole or in part from the AAV capsid set forth in SEQ ID NO: 44. In some embodiments, the amino acids from an AAV3b capsid as set forth in SEQ ID NO: 44 can be, or are substituted with amino acids from another capsid of a different AAV serotype, wherein the substituted and/or inserted amino acids can be from any AAV serotype, and can include either naturally occurring or partially or completely synthetic amino acids.

[0338] In another embodiment, an AAV capsid used in the treatment of Pompe Disease is an AAV3b265D capsid. In this particular embodiment, an AAV3b265D capsid comprises a modification in the amino acid sequence of the two-fold axis loop of an AAV3b capsid via replacement of amino acid G265 of the AAV3b capsid with D265. In some embodiments, an AAV3b265D capsid comprises SEQ ID NO: 46. However, the modified virus capsids of the invention are not limited to AAV capsids set forth in SEQ ID NO: 46 as set forth in International Patent Applications WO 2020/102645 and WO2021102107. In some embodiments, the amino acids from AAV3b265D as set forth in SEQ ID NO. 46 can be, or are substituted with amino acids from a capsid from an AAV of a different serotype, wherein the substituted and/or inserted amino acids can be from any AAV serotype, and can include either naturally occurring or partially or completely synthetic amino acids.

[0339] In another embodiment an rAAV vector useful in the treatment of Pompe Disease as disclosed herein is an AAV3b265D549A capsid. In this particular embodiment, an AAV3b265D549A capsid comprises a modification in the amino acid sequence of the two-fold axis loop of an AAV3b capsid via replacement of amino acid G265 of the AAV3b capsid with D265 and replacement of amino acid T549 of the AAV3b capsid with A549. In some embodiments, an AAV3b265D549A capsid comprises SEQ ID NO: 50 as disclosed herein International Patent Applications WO 2020/102645 and WO2021102107. However, the modified virus capsids of the invention are not limited to AAV capsids set forth in SEQ ID NO: 50. In some embodiments, the amino acids from AAV3b265D549A as set forth in SEQ ID NO: 50 can be, or are substituted with amino acids from a capsid from an AAV of a different serotype, wherein the substituted and/or inserted amino acids can be from any AAV serotype, and can include either naturally occurring or partially or completely synthetic amino acids. In some embodiments, the amino acids from AAV3bSASTG (i.e., a AAV3b capsid comprising Q263A/T265 mutations) can be, or are substituted with amino acids from a capsid from an AAV of a different serotype, wherein the substituted and/or inserted amino acids can be from any AAV serotype, and can include either naturally occurring or partially or completely synthetic amino acids.

[0340] In another embodiment, an rAAV vector useful in the treatment of Pompe Disease as disclosed herein is an AAV3b549A capsid. In this particular embodiment, an AAV3b549A capsid comprises a modification in the amino acid sequence of the two-fold axis loop of an AAV3b capsid via replacement of amino acid T549 of the AAV3b capsid with A549. In some embodiments, an AAV3b549A capsid comprises SEQ ID NO: 52 as disclosed herein International Patent Applications WO 2020/102645 and WO2021102107. However, the modified virus capsids of the invention are not limited to AAV capsids set forth in SEQ ID NO: 52. In some embodiments, the amino acids from AAV3b549A as set forth in SEQ ID NO: 52 can be, or are substituted with amino acids from a capsid from an AAV of a different serotype, wherein the substituted and/or inserted amino acids can be from any AAV serotype, and can include either naturally occurring or partially or completely synthetic amino acids.

[0341] In another embodiment, an rAAV vector useful in the treatment of Pompe Disease as disclosed herein is an AAV3bQ263Y capsid. In this particular embodiment, an AAV3bQ263Y capsid comprises a modification in the amino acid sequence of the two-fold axis loop of an AAV3b capsid via replacement of amino acid Q263 of the AAV3b capsid with Y263. In some embodiments, an AAV3b549A capsid comprises SEQ ID NO: 54 as disclosed herein International Patent Applications WO 2020/102645 and WO2021102107. However, the modified virus capsids of the invention are not limited to AAV capsids set forth in SEQ ID NO: 54. In some embodiments, the amino acids from AAV3bQ263Y as set forth in SEQ ID NO: 54 can be, or are substituted with amino acids from a capsid from an AAV of a different serotype, wherein the substituted and/or inserted amino acids can be from any AAV serotype, and can include either naturally occurring or partially or completely synthetic amino acids.

[0342] In another embodiment, an rAAV vector useful in the treatment of Pompe Disease as disclosed herein is AAV3bSASTG serotype or comprises a AAV3bSASTG capsid. In this particular embodiment, an AAV3bSASTG capsid comprises a modification in the amino acid sequence to comprise a SASTG mutation, in particular, the AAV3b capsid was modified to resemble AAV2 Q263A/T265 subvariant by introducing these modifications at similar positions in the AAV3b capsid (as disclosed in Messina E L, et al., Adeno-associated viral vectors based on serotype 3b use components of the fibroblast growth factor receptor signaling complex for efficient transduction. Hum. Gene Ther. 2012 October: 23(10):1031-4, Piacentino III, Valentino, et al. “X-linked inhibitor of apoptosis protein-mediated attenuation of apoptosis, using a novel cardiac-enhanced adeno-associated viral vector.” Human gene therapy 23.6 (2012): 635-646. which are both incorporated herein in their entirety by reference). Accordingly, in some embodiments, an rAAV vector useful in the treatment of Pompe Disease as disclosed herein is AAV3bSASTG serotype or comprises a AAV3bSASTG capsid comprising a AAV3b Q263A/T265 capsid. In some embodiments, the amino acids from AAV3bSASTG can be, or are substituted with amino acids from a capsid from an AAV of a different serotype, wherein the substituted and/or inserted amino acids can be from any AAV serotype, and can include either naturally occurring or partially or completely synthetic amino acids.

[0343] One can target desired tissues using the appropriate capsids. For example, the central nervous system using AAV9 or a rhesus capsid or a rational haploid using at least one of a AAV9 or Rhesus viral protein. One can target the muscle using myo AAV, see, e.g., WO2019/2071323 and WO2022/020616, which are incorporated herein in their entirity by reference.

[0344] In order to facilitate their introduction into a cell, an rAAV vector genome useful in the invention are recombinant nucleic acid constructs that include (1) a heterologous sequence to be expressed (in one embodiment, a polynucleotide encoding a GAA polypeptide) and (2) viral sequence elements that facilitate integration and expression of the heterologous genes. The viral sequence elements may include those sequences of an AAV vector genome that are required in cis for replication and packaging (e.g., functional ITRs) of the DNA into an AAV capsid. In an embodiment, the heterologous gene encodes GAA, which is useful for correcting a GAA-deficiency in a patient suffering from Pompe Disease. In an embodiment, such an rAAV vector genome may also contain marker or reporter genes. In an embodiment, an rAAV vector genome can have one or more of the AAV3b wild-type (WT) cis genes replaced or deleted in whole or in part, but retain functional flanking ITR sequences.

III. Optimized rAAV Vector Genome

[0345] In some embodiments of the methods and compositions as disclosed herein, an optimized rAAV vector genome is created from any of the elements disclosed herein and in any combination, including nucleic acid sequences encoding a promoter, an ITR, a poly-A tail, elements capable of increasing or decreasing expression of a heterologous gene, and in one embodiment, a nucleic acid sequence that is codon optimized for expression of GAA protein in vivo (i.e., wildtype GAA or codon optimized GAA) and optionally, one or more element to reduce immunogenicity. Such an optimized rAAV vector genome can be used with any AAV capsid that has tropism for the tissue and cells in which the rAAV vector genome is to be transduced and expressed.

[0346] In some embodiments, rAAV genome lacks the AAV P5 promoter or, a fragment thereof, which is normally located upstream of the liver-specific promoter as disclosed herein. Normally, the P5 promoter controls expression of the AAV rep/cap proteins during AAV replication. In some embodiments, this P5 promoter fragment is present in the rAAV vector as disclosed herein which contains predicted transcription factor binding sites, e.g., cyclic AMP-responsive element-binding protein 3 (CREB3), which can be activated by endoplasmic reticulum (ER)/Golgi stress (Sampieri 2019), activating transcription factor 2 (ATF2), which is also involved in stress response (Watson 2017), Nuclear Receptor Subfamily 1 Group I Member 2 (NR1I2) (also known as Pregnane X receptor [PXR]) is known to be enriched in liver, and is activated by pregnane steroids, rifampin and other molecules including dexamethasone (NR1I2 HGNC) (Xing 2020). Accordingly, in some embodiments, a fragment of the AAV P5 promoter in the rAAV genome is removed without affecting the intended performance of the GAA cassette. In some embodiments, the rAAV vector also comprises a RNA polymerase II termination sequence located between the polyA signal and the 3′ ITR. An exemplary terminal sequence is SEQ ID NO: 45, or SEQ ID NO:465, the later of which introduces two termination codons and one restriction site (e.g., XhoI) replaces TAG, and is located immediately downstream of the last coding amino acids of hGAA, and immediately located upstream of the 3′ UTR.

### IV. Subjects Amenable to Treatment

### A. Pompe Disease

[0347] The recombinant AAV expressing GAA protein as disclosed herein can be used in methods to treat Pompe disease. Pompe disease is a rare genetic disorder caused by a deficiency in the enzyme acid alpha-glucosidase (GAA), which is needed to break down glycogen, a stored form of sugar used for energy. Pompe disease is also known as glycogen storage disease type II, GSD II, type II glycogen storage disease, glycogenosis type II, acid maltase deficiency, alpha-1,4-glucosidase deficiency, cardiomegalia glycogenic diffusa, and cardiac form of generalized glycogenosis. The build-up of glycogen causes progressive muscle weakness (myopathy) throughout the body and affects various body tissues, particularly in the heart, skeletal muscles, liver, respiratory and nervous system.

[0348] Glycogen storage disease type II, also referred to as Pompe disease, is a rare disorder of metabolism inherited in an autosomal recessive manner, caused by deficiency of the lysosomal enzyme acid α-glucosidase (GAA). This disorder leads to the accumulation of lysosomal glycogen and destruction of skeletal, smooth and cardiac muscle. Pompe disease ranges in severity from a severe, infantile-onset myopathy accompanied by severe hypotonia and hypertrophic cardiomyopathy (infantile-onset Pompe disease [IOPD]) to a late-onset myopathy (LOPD). The defect in GAA can vary from complete to partial deficiency of GAA, which correlates with clinical severity. LOPD presents with proximal leg weakness and in some cases respiratory insufficiency without significant cardiac involvement and may progress to fatal respiratory failure.

[0349] Early onset (or the infantile form, IOPD) is the result of complete or near complete deficiency of GAA. Symptoms begin in the first months of life and progress rapidly, with feeding problems, poor weight gain, muscle weakness, floppiness, and head lag. Respiratory difficulties are often complicated by lung infections. The heart is grossly enlarged. Many infants with Pompe disease also have enlarged tongues. If untreated with Lumizyme, most babies die from cardiac or respiratory complications before their first birthday.

[0350] Late onset (or juvenile/adult, LOPD) Pompe disease is the result of a partial deficiency of GAA. The onset can be as early as the first decade of childhood or as late as the sixth decade of adulthood and is therefore characterized as slowly progressive. The primary symptom is proximal muscle weakness progressing to respiratory weakness and death from respiratory failure after a course lasting several years. The heart is usually not involved.

[0351] The presenting clinical manifestations of Pompe disease can vary widely depending on the age of disease onset and residual GAA activity. Residual GAA activity correlates with both the amount and tissue distribution of glycogen accumulation as well as the severity of the disease. Infantile-onset Pompe disease (less than 1% of normal GAA activity) is the most severe form and is characterized by hypotonia, generalized muscle weakness, and hypertrophic cardiomyopathy, and massive glycogen accumulation in cardiac and other muscle tissues. Death usually occurs within one year of birth due to cardiorespiratory failure. Juvenile-onset (1-10% of normal GAA activity) and adult-onset (10-40% of normal GAA activity) Pompe disease are more clinically heterogeneous, with greater variation in age of onset, clinical presentation, and disease progression. Juvenile- and adult-onset Pompe disease are generally characterized by lack of severe cardiac involvement, later age of onset, and slower disease progression, but eventual respiratory or limb muscle involvement results in significant morbidity and mortality. While life expectancy can vary, death generally occurs due to respiratory failure.

[0352] In any embodiment of the methods as disclosed herein, a GAA enzyme suitable for treating Pompe disease includes a wild-type human GAA, or a fragment or sequence variant thereof which retains the ability to cleave al-4 linkages in linear oligosaccharides. In some embodiments of the methods and compositions as disclosed herein, the GAA protein encoded by a GAA nucleic acid sequence, e.g., SEQ ID NO: 1-18 as disclosed herein, or a N-terminal truncation thereof as disclosed herein in Table 1. In some embodiments of the methods and compositions as disclosed herein, the GAA protein is encoded by a codon optimized GAA nucleic acid sequence, for example, for any one or more of: (1) enhanced expression in vivo, (2) to reduce CpG islands or (3) reduce the innate immune response. In some embodiments of the methods and compositions as disclosed herein, the GAA protein is encoded by a codon optimized GAA nucleic sequence, for example, any nucleic acid sequence selected from any of: SEQ ID NO: 1-18, or a nucleic acid sequence having at least 60%, or 70%, or 80%, 85% or 90% or 95%, or 98%, or 99% sequence identity to SEQ ID NOS: 1-18, which encode a GAA polypeptide, where amino acid at position 199 is R (199R); amino acid at position 233 is H (233H), and amino acid at position 780 is I (780I), as compared to the wild type GAA protein.

[0353] In some embodiments of the methods and compositions as disclosed herein, a rAAV vector as described herein transduces the liver of a subject and secretes the hGAA polypeptide into the blood, which perfuses patient tissues where the hGAA polypeptide, is taken up by cells and transported to the lysosome, where the GAA enzyme acts to eliminate material that has accumulated in the lysosomes due to the enzyme deficiency. For lysosomal enzyme replacement therapy to be effective, the therapeutic enzyme must be delivered to lysosomes in the appropriate cells in tissues where the storage defect is manifest.

[0354] In some embodiments, upon administration, the AAV vector selectively expresses and secretes GAA from transduced hepatocytes. The primary mechanism of action of a AAV vector expressing hGAA polypeptide as disclosed herein is to secrete continuous low levels of endogenous GAA from the liver into the systemic circulation in order to provide therapeutic exposure levels of GAA to tissue (e.g., the muscle, but not exclusively the muscle), resulting in glycogen removal and restoration of cellular architecture and function.

B. Increasing GAA Activity in A Subject with Pompe Disease

[0355] In any embodiment of the methods as disclosed herein, administration of a AAV vector expressing GAA is administration to a muscle, and can be by any suitable method including intravenous administration, intra-arterial administration, and/or intra-peritoneal administration. Exemplary modes of administration include oral, rectal, transmucosal, intranasal, inhalation (e.g., via an aerosol), buccal (e.g., sublingual), vaginal, intrathecal, intraocular, transdermal, in utero (or in ovo), parenteral (e.g., intravenous, subcutaneous, intradermal, intramuscular [including administration to skeletal, diaphragm and/or cardiac muscle], intradermal, intrapleural, intracerebral, and intraarticular), topical (e.g., to both skin and mucosal surfaces, including airway surfaces, and transdermal administration), intralymphatic, and the like, as well as direct tissue or organ injection (e.g., to liver, skeletal muscle, cardiac muscle, diaphragm muscle or brain). The most suitable route in any given case will depend on the nature and severity of the condition being treated and/or prevented and on the nature of the particular vector that is being used.

[0356] In any embodiment of the methods as disclosed herein, administration of a AAV vector expressing GAA as disclosed herein is to skeletal muscle according to the present invention, and includes but is not limited to administration to skeletal muscle in the limbs (e.g., upper arm, lower arm, upper leg, and/or lower leg), back, neck, head (e.g., tongue), thorax, abdomen, pelvis/perineum, and/or digits. Suitable skeletal muscles that can be injected are disclosed in International Application WO2021102107, which is incorporated herein its entirety by reference.

[0357] In any embodiment of the methods as disclosed herein, the rAAV vectors and/or rAAV genome are administered to the skeletal muscle, liver, diaphragm, costal, and/or cardiac muscle cells of a subject. For example, a conventional syringe and needle can be used to inject a rAAV virion suspension into an animal. Parenteral administration of a the rAAV vectors and/or rAAV genome, by injection can be performed, for example, by bolus injection or continuous infusion. Formulations for injection may be presented in unit dosage form, for example, in ampoules or in multi-dose containers, with an added preservative. The compositions may take such forms as suspensions, solutions or emulsions in oily or aqueous vehicles, and may contain agents for a pharmaceutical formulation, such as suspending, stabilizing and/or dispersing agents. Alternatively, the rAAV vectors and/or rAAV genome as disclosed herein can be in powder form (e.g., lyophilized) for constitution with a suitable vehicle, for example, sterile pyrogen-free water, before use.

[0358] In particular embodiments, more than one administration (e.g., two, three, four, five, six, seven, eight, nine, 10, etc., or more administrations) may be employed to achieve the desired level of GAA expression over a period of various intervals, e.g., hourly, daily, weekly, monthly, yearly, etc. Dosing can be single dosage or cumulative (serial dosing), and can be readily determined by one skilled in the art. As disclosed herein, it is envisioned that treatment of Pompe Disease according to the methods as disclosed herein comprises a one-time administration of an effective dose of a pharmaceutical composition comprising a AAV vector encoding a GAA polypeptide.

[0359] However, in alternative embodiments, treatment of a subject with Pompe disease may comprise multiple administrations of a pharmaceutical composition comprising a AAV vector encoding a GAA polypeptide when the subject is not administered long-term ERT, where the multiple administrations can be carried out over a range of time periods, such as, e.g., once yearly, or every 6-months, or about every 2-years, or about every 3-years, or about every 4 years, or about every 5-years or longer than 5-year intervals. The timing of administration can vary from individual to individual, depending upon such factors as the severity of an individual's symptoms. For example, in some embodiments, an effective dose of a AAV vector encoding a GAA polypeptide as disclosed herein can be administered to an individual once every year, or once every two years, or every six months for an indefinite period of time, or until the individual no longer requires therapy. A person of ordinary skill in the art will recognize that the condition of the individual can be monitored throughout the course of treatment and that the effective amount of a AAV vector encoding a GAA polypeptide as disclosed herein that is administered can be adjusted accordingly.

[0360] Injectables comprising a AAV vector encoding a GAA polypeptide as disclosed herein can be prepared in conventional forms, either as liquid solutions or suspensions, solid forms suitable for solution or suspension in liquid prior to injection, or as emulsions. Alternatively, one may administer a AAV vector encoding a GAA polypeptide as disclosed herein in a local rather than systemic manner, for example, in a depot or sustained-release formulation. Further, the virus vector and/or virus capsid can be delivered adhered to a surgically implantable matrix (e.g., as described in U.S. Patent Publication No. US-2004-0013645-A1). In some embodiments, a AAV vector encoding a GAA polypeptide as disclosed herein can be administered to the lungs of a subject by any suitable means, optionally by administering an aerosol suspension of respirable particles comprised of the virus vectors and/or virus capsids, which the subject inhales. The respirable particles can be liquid or solid. Aerosols of liquid particles comprising the virus vectors and/or virus capsids may be produced by any suitable means, such as with a pressure-driven aerosol nebulizer or an ultrasonic nebulizer, as is known to those of skill in the art. See, e.g., U.S. Pat. No. 4,501,729. Aerosols of solid particles comprising the virus vectors and/or capsids may likewise be produced with any solid particulate medicament aerosol generator, by techniques known in the pharmaceutical art.

[0361] In some embodiments, a AAV vector encoding a GAA polypeptide as disclosed herein can be formulated in a solvent, emulsion or other diluent in an amount sufficient to dissolve an rAAV vector disclosed herein. In other aspects of this embodiment, the rAAV vectors and/or rAAV genome encoding GAA polypeptide as disclosed herein can herein may be formulated in a solvent, emulsion or a diluent in an amount of, e.g., less than about 90% (v/v), less than about 80% (v/v), less than about 70% (v/v), less than about 65% (v/v), less than about 60% (v/v), less than about 55% (v/v), less than about 50% (v/v), less than about 45% (v/v), less than about 40% (v/v), less than about 35% (v/v), less than about 30% (v/v), less than about 25% (v/v), less than about 20% (v/v), less than about 15% (v/v), less than about 10% (v/v), less than about 5% (v/v), or less than about 1% (v/v). In other aspects, the rAAV vectors and/or rAAV genome encoding a GAA polypeptide as disclosed herein can disclosed herein may comprise a solvent, emulsion or other diluent in an amount in a range of, e.g., about 1% (v/v) to 90% (v/v), about 1% (v/v) to 70% (v/v), about 1% (v/v) to 60% (v/v), about 1% (v/v) to 50% (v/v), about 1% (v/v) to 40% (v/v), about 1% (v/v) to 30% (v/v), about 1% (v/v) to 20% (v/v), about 1% (v/v) to 10% (v/v), about 2% (v/v) to 50% (v/v), about 2% (v/v) to 40% (v/v), about 2% (v/v) to 30% (v/v), about 2% (v/v) to 20% (v/v), about 2% (v/v) to 10% (v/v), about 4% (v/v) to 50% (v/v), about 4% (v/v) to 40% (v/v), about 4% (v/v) to 30% (v/v), about 4% (v/v) to 20% (v/v), about 4% (v/v) to 10% (v/v), about 6% (v/v) to 50% (v/v), about 6% (v/v) to 40% (v/v), about 6% (v/v) to 30% (v/v), about 6% (v/v) to 20% (v/v), about 6% (v/v) to 10% (v/v), about 8% (v/v) to 50% (v/v), about 8% (v/v) to 40% (v/v), about 8% (v/v) to 30% (v/v), about 8% (v/v) to 20% (v/v), about 8% (v/v) to 15% (v/v), or about 8% (v/v) to 12% (v/v).

[0362] In any embodiment of the methods as disclosed herein, a AAV vector encoding a GAA polypeptide can be an AAV of any serotype, including but not limited to encapsulated by any AAV8 capsid, or any AAV3b capsid selected from: AAV3b capsid (SEQ ID NO: 452); AAV3b265D capsid (SEQ ID NO: 454), AAV3b ST (S663V+T492V) capsid (SEQ ID NO: 456), AAV3b265D549A capsid (SEQ ID NO: 458); AAV3b549A capsid (SEQ ID NO: 460); AAV3bQ263Y capsid (SEQ ID NO: 462) or AAV3bSASTG capsid (i.e., a AAV3b capsid comprising Q263A/T265 mutations).

[0363] To facilitate delivery of a AAV vector encoding a GAA polypeptide as disclosed herein, it can be mixed with a carrier or excipient. Carriers and excipients that might be used include saline (especially sterilized, pyrogen-free saline) saline buffers (for example, citrate buffer, phosphate buffer, acetate buffer, and bicarbonate buffer), amino acids, urea, alcohols, ascorbic acid, phospholipids, proteins (for example, serum albumin), EDTA, sodium chloride, liposomes, mannitol, sorbitol, and glycerol. USP grade carriers and excipients are particularly useful for delivery of virions to human subjects.

[0364] In addition to the formulations described previously, a AAV vector encoding a GAA polypeptide as disclosed herein can also be formulated as a depot preparation. Such long acting formulations may be administered by implantation (for example subcutaneously or intramuscularly) or by IM injection. Thus, for example, a rAAV vector and/or rAAV genome as disclosed herein may be formulated with suitable polymeric or hydrophobic materials (for example as an emulsion in an acceptable oil) or ion exchange resins, or as sparingly soluble derivatives.

[0365] In any embodiment of the methods as disclosed herein, the method is directed to treating Pompe Disease that results from a deficiency of GAA in a subject, wherein a AAV vector encoding a GAA polypeptide as disclosed herein is administered to a patient suffering from Pompe Disease, and following administration, GAA is secreted from cells in the liver and there is uptake of the secreted GAA by cells in skeletal muscle tissue, cardiac muscle tissue, diaphragm muscle tissue or a combination thereof, wherein uptake of the secreted GAA results in a reduction in lysosomal glycogen stores in the tissue(s), including but not limited to muscle. In some embodiments, a AAV vector encoding a GAA polypeptide as disclosed herein is encapsulated in a capsid, e.g., encapsulated by any AAV3b capsid selected from: AAV3b capsid (SEQ ID NO: 452); AAV3b265D capsid (SEQ ID NO: 454), AAV3b ST (S663V+T492V) capsid (SEQ ID NO: 456), AAV3b265D549A capsid (SEQ ID NO: 458); AAV3b549A capsid (SEQ ID NO: 460); AAV3bQ263Y capsid (SEQ ID NO: 462) or AAV3bSASTG capsid (i.e., a AAV3b capsid comprising Q263A/T265 mutations).

[0366] In a particular embodiment, at least about 1.6×10¹² to about 4.0×10¹² vg/kg will be administered per dose in a pharmaceutically acceptable carrier. In a further embodiment, dosages of the virus vector and/or capsid to be administered to a subject depend upon the mode of administration, the severity and type of Pompe disease (i.e., LOPD or IOPD) to be treated and/or prevented, the individual subject's condition, age and gender, and the particular virus vector or capsid, the nucleic acid encoding GAA polypeptide to be delivered, and the like, and can be determined in a routine manner.

[0367] Exemplary doses for achieving therapeutic effects are titers of at least about between 1.0E9 vg/kg and 5.0E13 vg/kg, e.g., 1.0E9 vg/kg and 5.0E12 vg/kg; 5.0E9 vg/kg and 5.0E12 vg/kg; 5.0E9 vg/kg and 1.0E12 vg/kg; 5.0E9 vg/kg and 5.0E11 vg/kg; 5.0E9 vg/kg and 5.0E10 vg/kg; and 1.0E9 vg/kg and 1.0E10 vg/kg.1.5×10¹¹ vg/kg, or at least about 1.5×10¹² vg/kg, or at least about 4.0×10¹² vg/kg. It is encompassed that the dose for achieving therapeutic effects as disclosed herein may also be determined by the strength of the liver specific promoter (LSP) operatively linked to the nucleic acid encoding the GAA polypeptide, as well as specific signal sequence, and ability of the cell to cleave the signal sequence when secreted from the cell. In contrast, the dose of the AAV encoding the GAA polypeptide as disclosed herein can be lower than about 1.6×10¹² when the liver specific promoter is stronger than the LPS (SEQ ID NO: 97) used in a AAV8-LSPhGAA vector, however, the dose of AAV should be titrated and determined based on the level of GAA expressed in the cell, as determined by transduction efficiency of the AAV capsid and the LSP, and the ability of the cell to secrete the expressed GAA polypeptide in order to avoid GAA accumulation in the transfected cell and any associated cell toxicity.

[0368] In another aspect, disclosed herein is a method of treating Pompe Disease by administering a nucleic acid encoding a GAA to a cell, comprising contacting the cell with a rAAV vector and/or rAAV genome as disclosed herein, under conditions for the nucleic acid to be introduced into the cell and expressed to produce GAA. In some embodiments, the cell is a cell in vivo. In some embodiments, the cell is a mammalian cell in vivo.

### C. Increasing Motoneuron Function In A Mammal

[0369] In any embodiment of the methods as disclosed herein, a AAV vector encoding a GAA polypeptide as disclosed herein is useful in methods to increase phrenic nerve activity in a mammal having Pompe disease and/or insufficient GAA levels. For example, a AAV vector encoding a GAA polypeptide as disclosed herein, e.g., a rAAV vector and/or rAAV genome encapsulated in a capsid, e.g., encapsulated by AAV8 or any AAV3b capsid selected from: AAV3b capsid (SEQ ID NO: 452); AAV3b265D capsid (SEQ ID NO: 454), AAV3b ST (S663V+T492V) capsid (SEQ ID NO: 456), AAV3b265D549A capsid (SEQ ID NO: 458); AAV3b549A capsid (SEQ ID NO: 460); AAV3bQ263Y capsid (SEQ ID NO: 462) or AAV3bSASTG capsid, can be administered to the central nervous system (e.g., neurons). In another embodiment, retrograde transport a AAV vector encoding a GAA polypeptide as disclosed herein from the diaphragm (or other muscle) to the phrenic nerve or other motor neurons can result in biochemical and physiological correction of Pompe disease. These same principles could be applied to other neurodegenerative disease.

[0370] In an embodiment, a rAAV capsid of the rAAV virion used to treat Pompe Disease is any of those listed in Table 1 as disclosed in International Applications WO2020/102645, and WO2020/102667, each of which are incorporated herein in their entirety, and includes any of AAV8 or AAV3, or AAV3b (including but not limited to AAV3b serotypes AAV3b265D, AAV3b265D549A, AAV3b549A, AAV3bQ263Y, AAV3bSASTG (i.e., a AAV3b capsid comprising Q263A/T265 mutations) serotypes) is capable of reducing any one or more of the symptoms of (i) the feeling of weakness in a patient's lower extremities, including, the legs, trunk and/or arms, (ii) a shortness of breath, a hard time exercising, lung infections, a big curve in the spine, trouble breathing while sleeping, an enlarged liver, an enlarged tongue and/or a stiff joint, (iii) in a patient suffering from Pompe Disease by, e.g., at least 10%, at least 15%, at least 20%, at least 25%, at least 30%, at least 35%, at least 40%, at least 45%, at least 50%, at least 55%, at least 60%, at least 65%, at least 70%, at least 75%, at least 80%, at least 85%, at least 90% or at least 95% as compared to a patient not receiving the same treatment. In other aspects of this embodiment, an AAV GAA of any serotype is capable of reducing any one or more of the systems of (i) the feeling of weakness in a patient's lower extremities, including, the legs, trunk and/or arms, ii) a shortness of breath, a hard time exercising, lung infections, a big curve in the spine, trouble breathing while sleeping, an enlarged liver, an enlarged tongue and/or a stiff joint, (iii) in a patient suffering from Pompe Disease by, e.g., about 10% to about 100%, about 20% to about 100%, about 30% to about 100%, about 40% to about 100%, about 50% to about 100%, about 60% to about 100%, about 70% to about 100%, about 80% to about 100%, about 10% to about 90%, about 20% to about 90%, about 30% to about 90%, about 40% to about 90%, about 50% to about 90%, about 60% to about 90%, about 70% to about 90%, about 10% to about 80%, about 20% to about 80%, about 30% to about 80%, about 40% to about 80%, about 50% to about 80%, or about 60% to about 80%, about 10% to about 70%, about 20% to about 70%, about 30% to about 70%, about 40% to about 70%, or about 50% to about 70% as compared to a patient not receiving the same treatment.

[0371] In any embodiment of the methods and compositions as disclosed herein, at least one symptom associated with Pompe Disease, or at least one adverse side effect associated with Pompe Disease are reduced by at least 10%, at least 15%, at least 20%, at least 25%, at least 30%, at least 35%, at least 40%, at least 45%, at least 50%, at least 55%, at least 60%, at least 65%, at least 70%, at least 75%, at least 80%, at least 85%, at least 90%, or at least 95%, and the severity of at least one symptom associated with Pompe Disease, or at least one adverse side effect is reduced by at least 10%, at least 15%, at least 20%, at least 25%, at least 30%, at least 35%, at least 40%, at least 45%, at least 50%, at least 55%, at least 60%, at least 65%, at least 70%, at least 75%, at least 80%, at least 85%, at least 90%, or at least 95%. In another embodiment, at least one symptom associated with Pompe Disease, or at least one adverse side effect associated with Pompe Disease is reduced by about 10% to about 100%, about 20% to about 100%, about 30% to about 100%, about 40% to about 100%, about 50% to about 100%, about 60% to about 100%, about 70% to about 100%, about 80% to about 100%, about 10% to about 90%, about 20% to about 90%, about 30% to about 90%, about 40% to about 90%, about 50% to about 90%, about 60% to about 90%, about 70% to about 90%, about 10% to about 80%, about 20% to about 80%, about 30% to about 80%, about 40% to about 80%, about 50% to about 80%, or about 60% to about 80%, about 10% to about 70%, about 20% to about 70%, about 30% to about 70%, about 40% to about 70%, or about 50% to about 70%.

### V. Methods of Administration

[0372] Without wishing to be bound by theory, the only current treatment for Pompe disease is long-term administration of recombinant human GAA (rhGAA) ERT, which is typically administered on an every-other week regimen. Herein, the inventors have demonstrated that a subject with Pompe disease can take breaks from the normal ERT regimen for extended period of time (e.g., extended periods of ERT cessation) without a clinical set back if the subject is administered a specific dose of AAV vector expressing a GAA polypeptide as disclosed herein. In some embodiments, withdrawal of the administration of long-term ERT begins at about the time of administration of the AAV vector to the subject (e.g., the day before, the day of, or the day after), or in some embodiments, withdrawal of the administration of long-term ERT can occur at about 26 weeks, or anywhere within about 24 to about 26 weeks after administration of the AAV vector.

[0373] In some embodiments, a subject administered a AAV vector expressing GAA as disclosed herein, can, after an initial period of withdrawal of the administration of long-term ERT for an extended period of time, be administered complementary ERT, where the complementary ERT is administered after about 6-months, or about 1 year, or longer than a year of cessation of the long-term ERT. Stated differently and without wishing to be bound by theory, the technology disclosed herein relates to a method whereby a subject with Pompe disease who is administered a AAV vector expressing GAA as disclosed herein, can have breaks or “holidays” from the normal long-term ERT administration. That is, according to the methods as disclosed herein, a subject administered an AAV vector expressing GAA as disclosed herein can have extended periods of time with the absence of administration of long-term ERT administration. In some embodiments, the methods as disclosed herein enable flexibility in normal ERT regimens, in that extended breaks or withdrawal of administration of long-term ERT does not result in a clinical decline—that is, a subject remains clinically stable despite not having ongoing long-term ERT.

[0374] In some embodiments, the methods as disclosed herein encompass re-administration of ERT (herein referred to as “complementary ERT”) after an extended period of time of cessation of ERT administration, and enable flexibility in normal ERT regimen, as the continued production of GAA expressed by the AAV permits ERT flexibility. In some embodiments, the complementary ERT is pulse administration of ERT, as disclosed herein. In some embodiments, the complementary ERT is at less frequent intervals, or at a lower dose, or at irregular doses, or at irregular intervals as compared to the prior administration of long-term ERT.

[0375] Accordingly, the methods as disclosed herein provide significant advantages to subjects with Pompe disease, including but not limited to reducing or eliminating the rigorous and arduous weekly, or every-other week infusions of long-term rhGAA ERT treatment, which are significantly time-consuming and geographically limiting, and hinders a patient with Pompe disease from travelling for prolonged periods from areas where their ERT infusions are administered. Additionally, as disclosed herein, the absence of ERT administration also reduces any side effects due to anti-rhGAA antibodies against the ERT, and also circumvents the need for administration of immune suppressants normally co-administered with the ERT. As such, the methods to treat Pompe disease as disclosed here leads to greater flexibility in Pompe treatment and an improvement in quality of life and lifestyle of subjects with Pompe disease.

[0376] Accordingly, in one embodiment, the technology relates to a method of treating Pompe disease in a subject, comprising administering to the subject a pharmaceutical composition comprising a recombinant adeno-associated virus (AAV) vector comprising in its genome, a heterologous nucleic acid sequence encoding an alpha-glucosidase (GAA) polypeptide in expressible form wherein the heterologous nucleic acid is operatively linked to a liver-specific promoter, in the absence of administration of long-term GAA enzyme replacement therapy (ERT) for an extended period of time (e.g., ERT administration can be withdrawn or stopped at about 24, or at about 26 weeks, or earlier than 24- or 26 weeks, after administration of the recombinant AAV). In some embodiments, the dosage of the recombinant AAV comprising nucleic acid encoding GAA polypeptide ranges from 1.0E11 vg/kg and 5.0E13 vg/kg, and in some embodiments, the GAA is expressed to a level that the subject obtains a blood serum level of GAA expressed by the AAV at a pharmaceutical activity range from 160 to ≤2,260 nmol/mL/hr, 165 to ≤2,260 nmol/ml/hr, 175 to ≤2,260, 180 to ≤2,260, 185 to ≤2,260, 189 to ≤2,260 of at least within two weeks of administration. In some embodiments, the dosage of the AAV expressing a GAA polypeptide ranges from 11.0E11 vg/kg and 5.0E13 vg/kg, and in some embodiments, is no more than 4.0E¹² vg/kg, and in some embodiments, the GAA is expressed to a level that the subject obtains a blood serum level of GAA expressed by the AAV at a pharmaceutical activity range from 189 to ≤2,260 nmol/mL/hr of at least within two weeks of administration. In some embodiments, the dosage of the AAV expressing GAA is no more than 4.0E¹² vg/kg, and in some embodiments, the GAA is expressed to a level that the subject obtains a blood serum level of GAA expressed by the AAV at a pharmaceutical activity range from 189 to ≤2,260 nmol/mL/hr of at least within two weeks of administration.

[0377] In some embodiments, the dosage of AAV expressing GAA is no more than 5.0E¹¹ vg/kg. In some embodiments, the dosages range from 1.0E⁹ vg/kg to 5.0E¹¹ vg/kg.

[0378] In some embodiments, the dosage of AAV expressing GAA is no more than 5.0E13 vg/kg. In some embodiments, the dosages range from 1.0E9 vg/kg or 5.0E13 vg/kg.

[0379] In particular, the technology described herein relates to the discovery that a single infusion of a rAAV vector expressing human acid alpha-glucosidase (GAA) can be a stand-alone replacement for repeated infusions of enzyme replacement therapy (ERT) with recombinant human GAA protein (rhGAA). The inventors demonstrate that a one-time administration of AAV expressing GAA leads to long-term transduction of a normal GAA gene into hepatocytes and continuous constitutive expression of GAA in the systemic circulation. Accordingly, the inventors demonstrate herein that administration of a composition comprising AAV expressing hGAA can replace the biweekly exogenous administration of ERT that subjects with Pompe disease normally receive. That is, the inventors have demonstrated herein that subjects with Pompe that are administered a AAV expressing hGAA as disclosed herein can have long term cessation of ERT.

[0380] In particular, described herein is a method of treating Pompe in a subject in need thereof by administering the subject a composition comprising a AAV vector expressing the α-glucosidase (GAA) protein, where the subject is not being concurrently administered a GAA enzyme replacement therapy. In some embodiments, the technology relates to a method of administering a AAV expressing GAA where the subject can be withdrawn from a GAA enzyme replacement therapy (ERT) for an extended period of time, e.g., at least 3 months, at least 4 months, at least 5 months, at least 1 year, at least 1%₂ years and points in between 6 months or longer. In some embodiments, the subject is withdrawn from ERT on the day of, or shortly before administration of a AAV expressing GAA, and is clinically stable with respect to at least one or more, as disclosed herein. In some embodiments, the subject is withdrawn from ERT at any time between 1-2 days before or after administration, and about 6-months after administration of a AAV expressing GAA, and is clinically stable with respect to at least one or more Pompe symptoms for at least 6 months, as disclosed herein.

[0381] Additionally, the inventors have also discovered that Pompe patients administered a AAV expressing GAA according to the methods and dose ranges as disclosed herein, there is minimal immune response to the GAA protein expressed by the AAV. According, in some embodiments, there is minimal, or no need for immune modulation or administration of immune suppressants at the time of, or before, or after the administration of the AAV to the subject, and therefore normal immune suppressants protocols which are typically administered when a subject is administered a viral vector, or undergoing gene therapy are not required.

[0382] Accordingly, in all embodiments herein, the method to treat Pompe comprises, or consists essentially of, or consists of, administering an AAV vector expressing GAA as disclosed herein, in the absence of administration of ERT for Pompe, and also in the absence of immune modulation. In some embodiments, the subject has late onset Pompe Disease (LOPD) or infantile-onset Pompe disease.

[0383] In all aspects disclosed herein, the AAV, that comprise a nucleotide sequence containing inverted terminal repeats (ITRs), a promoter, a heterologous gene, a poly-A tail and potentially other regulator elements for use to treat a Pompe disease, e.g., late onset Pompe disease (LOPD), wherein the heterologous gene is GAA, and wherein the vector, e.g., rAAV can be administered to a patient in a therapeutically effective dose that is delivered to the appropriate tissue and/or organ for expression of the heterologous GAA gene and treatment of the disease, e.g., Pompe disease.

[0384] In some embodiments, a subject administered a AAV vector expressing GAA as disclosed herein, can, after an initial period of withdrawal of the administration of long-term ERT for an extended period of time, be administered complementary ERT, where the complementary ERT is administered after about 6-months, or about 1 year, or longer than a year of cessation of the long-term ERT. Stated differently and without wishing to be bound by theory, the technology disclosed herein relates to a method whereby a subject with Pompe disease who is administered a AAV vector expressing GAA as disclosed herein, can have breaks or “holidays” from the normal long-term ERT administration. That is, according to the methods as disclosed herein, a subject administered an AAV vector expressing GAA as disclosed herein can have extended periods of time with the absence of administration of long-term ERT administration. In some embodiments, the methods as disclosed herein enable flexibility in normal ERT regimens, in that extended breaks or withdrawal of administration of long-term ERT does not result in a clinical decline—that is, a subject remains clinically stable despite not having ongoing long-term ERT.

[0385] In some embodiments, the methods as disclosed herein encompass re-administration of ERT (herein referred to as “complementary ERT”) after an extended period of time of cessation of ERT administration, and enable flexibility in normal ERT regimen, as the continued production of GAA expressed by the AAV permits ERT flexibility. In some embodiments, the complementary ERT is pulse administration of ERT, as disclosed herein. In some embodiments, the complementary ERT is at less frequent intervals, or at a lower dose, or at irregular doses, or at irregular intervals as compared to the prior administration of long-term ERT.

[0386] Accordingly, the methods as disclosed herein provide significant advantages to subjects with Pompe disease, including but not limited to reducing or eliminating the rigorous and arduous weekly, or every-other week infusions of long-term rhGAA ERT treatment, which are significantly time-consuming and geographically limiting, and hinders a patient with Pompe disease from travelling for prolonged periods from areas where their ERT infusions are administered. Additionally, as disclosed herein, the absence of ERT administration also reduces any side effects due to anti-rhGAA antibodies against the ERT, and also circumvents the need for administration of immune suppressants normally co-administered with the ERT. As such, the methods to treat Pompe disease as disclosed here leads to greater flexibility in Pompe treatment and an improvement in quality of life and lifestyle of subjects with Pompe disease.

[0387] Accordingly, in one embodiment, the technology relates to a method of treating Pompe disease in a subject, comprising administering to the subject a pharmaceutical composition comprising a recombinant adeno-associated virus (AAV) vector comprising in its genome, a heterologous nucleic acid sequence encoding an alpha-glucosidase (GAA) polypeptide in expressible form wherein the heterologous nucleic acid is operatively linked to a liver-specific promoter, in the absence of administration of long-term GAA enzyme replacement therapy (ERT) for an extended period of time (e.g., ERT administration can be withdrawn or stopped at about 24, or at about 26 weeks, or earlier than 24- or 26 weeks, after administration of the recombinant AAV). In some embodiments, the dosage of the recombinant AAV comprising nucleic acid encoding GAA polypeptide ranges from 1.0E9 vg/kg to 5.0E13 vg/kg, and in some embodiments, the GAA is expressed to a level that the subject obtains a blood serum level of GAA expressed by the AAV at a pharmaceutical activity range from 160 to ≤2,260 nmol/mL/hr, 165 to ≤2,260 nmol/ml/hr, 175 to ≤2,260, 180 to ≤2,260, 185 to ≤2,260, 189 to ≤2,260 of at least within two weeks of administration. In some embodiments, the dosage of the AAV expressing GAA is in the range of 1.0E9 vg/kg and 5.0E13 vg/kg, and in some embodiments, the GAA is expressed to a level that the subject obtains a blood serum level of GAA expressed by the AAV at a pharmaceutical activity range from 189 to ≤2,260 nmol/mL/hr of at least within two weeks of administration. In some embodiments, the dosage of the AAV expressing GAA is in the range of 1.0E9 vg/kg and 5.0E13 vg/kg, and in some embodiments, the GAA is expressed to a level that the subject obtains a blood serum level of GAA expressed by the AAV at a pharmaceutical activity range from 189 to ≤2,260 nmol/mL/hr of at least within two weeks of administration.

[0388] In particular, the technology described herein relates to the discovery that a single infusion of a rAAV vector expressing human acid alpha-glucosidase (GAA) can be a stand-alone replacement for repeated infusions of enzyme replacement therapy (ERT) with recombinant human GAA protein (rhGAA). The inventors demonstrate that a one-time administration of AAV expressing GAA leads to long-term transduction of a normal GAA gene into hepatocytes and continuous constitutive expression of GAA in the systemic circulation. Accordingly, the inventors demonstrate herein that administration of a composition comprising AAV expressing hGAA can replace the biweekly exogenous administration of ERT that subjects with Pompe disease normally receive. That is, the inventors have demonstrated herein that subjects with Pompe that are administered a AAV expressing hGAA as disclosed herein can have long term cessation of ERT.

[0389] In particular, described herein is a method of treating Pompe in a subject in need thereof by administering the subject a composition comprising a AAV vector expressing the α-glucosidase (GAA) protein, where the subject is not being concurrently administered a GAA enzyme replacement therapy. In some embodiments, the technology relates to a method of administering a AAV expressing GAA where the subject can be withdrawn from a GAA enzyme replacement therapy (ERT) for an extended period of time, e.g., at least 3 months, at least 4 months, at least 5 months, at least 1 year, at least 1%₂ years and points in between 6 months or longer. In some embodiments, the subject is withdrawn from ERT on the day of, or shortly before administration of a AAV expressing GAA, and is clinically stable with respect to at least one or more, as disclosed herein. In some embodiments, the subject is withdrawn from ERT at any time between 1-2 days before or after administration, and about 6-months after administration of a AAV expressing GAA, and is clinically stable with respect to at least one or more Pompe symptoms for at least 6 months, as disclosed herein.

[0390] Additionally, the inventors have also discovered that Pompe patients administered a AAV expressing GAA according to the methods and dose ranges as disclosed herein, there is minimal immune response to the GAA protein expressed by the AAV. According, in some embodiments, there is minimal, or no need for immune modulation or administration of immune suppressants at the time of, or before, or after the administration of the AAV to the subject, and therefore normal immune suppressants protocols which are typically administered when a subject is administered a viral vector, or undergoing gene therapy are not required.

[0391] Accordingly, in all embodiments herein, the method to treat Pompe comprises, or consists essentially of, or consists of, administering an AAV vector expressing GAA as disclosed herein, in the absence of administration of ERT for Pompe, and also in the absence of immune modulation. In some embodiments, the subject has late onset Pompe Disease (LOPD) or infantile-onset Pompe disease.

[0392] The disclosure herein relates, in general, to a method to treat a subject with Pompe Disease, comprising administering to the subject with Pompe disease a pharmaceutical composition comprising, or consisting essentially of, a recombinant adenovirus associated (AAV) vector comprising in its genome, a heterologous nucleic acid sequence encoding a polypeptide comprising an alpha-glucosidase (GAA) polypeptide, wherein the heterologous nucleic acid is operatively linked to a liver-specific promoter, and wherein the subject is not administered a GAA enzyme replacement therapy (ERT) for an extended period of time, or can have extended breaks from ERT. In one embodiment, ERT is continued, but at least one of: dosage or frequency is reduced.

[0393] Without wishing to be bound by theory, the inventors have discovered a method to treat Pompe disease with AAV-mediated delivery of GAA to the subject, where the rAAV expresses GAA to a steady state shortly after administration, such that the subject could be withdrawn from ERT as early as, or at, or around the time of the rAAV administration, e.g., ERT can be withdrawn the day before administration, the same day of administration, or the day after administration, or within a week, or within 2-weeks of administration. As disclosed herein, a steady state of GAA expression by the rAAV as disclosed herein is a serum level of GAA at a pharmacological activity range from 189 to ≤2,260 nmol/mL/hr.

[0394] In some embodiments, the method to treat Pompe disease with rAAV expressing GAA as disclosed herein comprises administration of a therapeutically effective amount of a rAAV to result in a serum level of expressed hGAA within a pharmacological activity range of between 189 to 410 nmol/mL/hr, or 410 to ≤2,260 nmol/mL/hr.

[0395] In some embodiments, the method to treat Pompe disease with rAAV expressing GAA as disclosed herein comprises administration of a rAAV to result in a serum level of expressed hGAA within a range of 189 to ≤2,260 nmol/mL/hr, and where the subject achieves clinical stability of one or more symptoms of Pompe disease. Clinical stability includes a steady state in any one or more of the parameters: the 6 MWT (6-minute walk test), FVC (Forced vital capacity). In some embodiments, clinical stability refers to a stable level in either motor function (as determined by the 6 MWT) and/or pulmonary function (as determined by the FVC) in two consecutive assessments no less than 3-months apart. In some embodiments, a clinical stable level of motor function as determined by the 6 MWT is ≤12% decline, or less than a 43-meter decrease from baseline in two consecutive assessments no less than 3-months apart. Stated differently, a clinical stable level of motor function as determined by the 6 MWT position is within a 0-12% decline from a baseline level in two consecutive assessments no less than 3-months apart.

[0396] In some embodiments, a clinical stable level of pulmonary function as determined by the FVC % predicted in an upright position is ≤15% decrease from baseline in two consecutive assessments no less than 3-months apart. Stated differently, a clinical stable level of pulmonary function as determined by the % FVC predicted in an upright position is between 1-14% from a baseline in two consecutive assessments no less than 3-months apart.

[0397] In some embodiments, the baseline level of the 6 MWT or FVC is the level measured at or before administration of the rAAV expressing GAA. In some embodiments, the baseline level of the 6 MWT or FVC is the level measured at or before administration of the rAAV expressing GAA when the subject is concurrently administered GAA ERT. In some embodiments, the baseline level of the 6 MWT or FVC is the level measured at or before administration of the rAAV expressing GAA when the subject is withdrawn from GAA ERT. In some embodiments, the baseline level of the 6 MWT or, FVC is the level before withdrawing GAA ERT, e.g, at about 24 to about 26 weeks. In some embodiments, clinical stability is maintained between before ERT withdrawal and after ERT withdrawal of Pompe patients where the patients have received single administration of AAV comprising nucleic acid encoding GAA administrated at the the time of ERT administration, before ERT administration, or, after ERT administration. Clinical stability is maintained indicate that 6 MWT and or, FVC are within the ranges from baseline as described herein.

[0398] In some embodiments, the method to treat Pompe disease with rAAV expressing GAA as disclosed herein comprises administration of an amount of rAAV to result in a reduction of glycogen levels in one or more tissues to within a normal range, where the normal range is the glycogen levels in the comparative tissue of a subject without Pompe disease.

### A. AAV-hGAA Dosages

[0399] In some embodiments, the methods disclosed herein relate to human subjects can be administered a rAAV expressing GAA as disclosed herein at a dose in the range of 1.0E11 vg/kg and 5.0E13 vg/kg. In some embodiments, ERT withdrawal can occur at the time of the administration of the rAAV expressing GAA, or occurring at about 24 or 26 weeks after recombinant AAV administration. In some embodiments, there can be a therapeutic correction of disease pathophysiology with administration of the rAAV expressing GAA as disclosed herein, even in the absence of ERT, and also protection against immune response to the expressed hGAA e.g, as measured by the antibodies against the expressed hGAA, therefore demonstrating that subjects with Pompe disease that are administered a AAV expressing hGAA as disclosed herein can have long term cessation of ERT, which is further discussed, e.g., in International Patent Application No. PCT/US2023/013713, which is incorporated herein by reference in its entirety.

[0400] In some embodiments the dose of the a rAAV vector or rAAV genome to be administered to the subject according to the method to treat Pompe Disease as disclosed herein depends upon the mode of administration, the promoter used, the signal peptide used, the severity of the Pompe disease or other condition to be treated and/or prevented, the individual subject's condition, the particular virus vector or capsid, the liver-specific promoter being used and the nucleic acid to be delivered, including but not limited to, nucleic acid encoding the signal peptide attached to the 5′ of the nucleic acid encoding expressible GAA polypeptide, and the like, and can be determined in a routine manner.

[0401] In some embodiments, the therapeutically effective amount of the rAAV vector expressing GAA is an amount that results in a serum GAA concentration at steady state similar to the GAA pharmacological activity achieved by long term GAA ERT (e.g within 5%, 10%, 20% of such levels). For example, a target GAA serum concentration at steady state ranging from about 160 to ≤2,260 nmol/mL/hr, from about 189 to ≤2,260 nmol/mL/hr, or rangin from 410 to ≤2,260 nmol/mL/hr. In some embodiments, the dose of the rAAV vector expressing GAA is a therapeutically effective amount to achieve a target GAA serum concentration at steady state that confers pharmacological activity ranges from 189 to ≤2,260 nmol/mL/hr. In some embodiments, the dose of the rAAV vector expressing GAA is a therapeutically effective amount to increase the tissue GAA levels in the subject to >0.30 μmol 4MU/min/gram of tissue, where the normal range of tissue GAA content in a subject without Pompe disease is 0.36±/0.13 μmol 4MU/min/gram of tissue. In some embodiments, the dose of the rAAV vector expressing GAA is a therapeutically effective amount to increase the tissue GAA levels in the subject to between 0.25 to 0.4 μmol 4MU/min/gram of tissue. In some embodiments, the dose of the rAAV vector expressing GAA is a therapeutically effective amount to result in a normal tissue GAA content of about 0.36 μmol 4MU/min/gram of tissue, e.g. about 0.25, or about 0.26, or about 0.27, or about 0.28, or about 0.29, or about 0.30, or about 0.31, or about 0.32, or about 0.33, or about 0.34, or about 0.35, or about 0.36, or about 0.37, or about 0.38, or about 0.39, or about 0.40 μmol 4MU/min/gram of tissue.

[0402] In some embodiments, the dose of the rAAV vector expressing GAA is a therapeutically effective amount to increase the tissue GAA levels in the subject to between 0.1-0.5 μmol 4MU/min/gram of tissue. In some embodiments, the dose of the rAAV vector expressing GAA is a therapeutically effective amount to result in a normal tissue GAA content of about greater than 0.36 μmol 4MU/min/gram of tissue. In some embodiments, the dose of the rAAV vector expressing GAA is a therapeutically effective amount to increase tissue GAA content or levels in the subject within the range 0.2-0.4 mol 4MU/min/gram of tissue. In some embodiments, the dose of the rAAV vector expressing GAA is a therapeutically effective amount to increase tissue GAA content in the subject to within 40%, or within 30%, or within 20%, or within 10%, or within 9%, 8%, 7%, 6%, 5%, 4%, 3%, 2% or 1% of the normal muscle tissue GAA content of 0.36±0.13 (μmol 4MU/min/gram of tissue), where the GAA content of normal muscle tissue is a reference level of GAA in a subject without Pompe Disease. In some embodiments, the dose of the rAAV vector expressing GAA is a therapeutically effective amount to increase tissue GAA content in the subject greater than 0.1 mol 4MU/min/gram of tissue, where the normal range GAA content in subjects with Pompe disease is 0.05±0.04 μmol 4MU/min/gram of tissue). In some embodiments, the dose of the rAAV vector expressing GAA is a therapeutically effective amount to increase tissue GAA content in the subject more than 2-fold, or 3-fold, or 4-fold, or 5-fold, or 6-fold, or 7-fold, or 8-fold, or 9-fold, or 10-fold, or more than 10-fold of the level of GAA tissue content in the subject with Pompe. In some embodiments, the dose of the rAAV vector expressing GAA is a therapeutically effective amount to increase tissue GAA content in the subject to about 50%, or, about 40%, or about 30%, or about 20%, or about 10%, or about 9%, about 8%, about 7%, about 6%, about 5%, about 4%, about 3%, about 2% or about 1% of the level of GAA tissue content in the subject with Pompe. In some embodiments, the GAA activity in muscle is at least 1.5 fold, at least 2 fold, at least 3 fold, at least 5 fold, at least 8 fold, or at least 10 fold than the level prior to AAV administration. In some embodiments, the GAA activity in muscle is at least 1.5 fold, at least 2 fold, at least 3 fold, at least 5 fold, at least 8 fold, or at least 10 fold than the level after the long term ERT was withdrawn for at least about 24 weeks.

[0403] In some embodiments, the dose of the rAAV vector expressing GAA is a therapeutically effective amount to reduce the tissue glycogen levels in the subject within the range 0.25% wet tissue weight to about 1.5% wet tissue weight. In some embodiments, the dose of the rAAV vector expressing GAA is a therapeutically effective amount to reduce the muscle tissue glycogen levels in the subject to within 40%, or within 30%, or within 20%, or within 10%, or within 9%, 8%, 7%, 6%, 5%, 4%, 3%, 2% or 1% of the normal muscle tissue glycogen content of 0.99%±0.74 (% wet tissue weight), which is the normal muscle tissue glycogen content (measured as % wet tissue weight), of a subject that does not have Pompe disease.

[0404] In some embodiments, the dose of the rAAV vector expressing GAA is a therapeutically effective amount of GAA to exhibit an improvement in the therapeutic index of 3- to 5-fold.

[0405] In some embodiments, the dose of the rAAV vector expressing GAA is a therapeutically effective amount to result in the subject having clinically stable levels of hGAA at 10-weeks, or at least 20 weeks, or 30 weeks post AAV administration.

[0406] In an embodiment, as used herein, without limitation, the term “effective amount” is synonymous with “therapeutically effective amount”, “effective dose”, or “therapeutically effective dose.” In an embodiment, the effectiveness of a therapeutic compound disclosed herein to treat Pompe Disease can be determined, without limitation, by observing an improvement in an individual based upon one or more clinical symptoms, and/or physiological indicators associated with Pompe Disease. In an embodiment, an improvement in the symptoms associated with Pompe Disease can be indicated by a reduced need for a concurrent therapy.

[0407] In some embodiments, exemplary doses for achieving therapeutic effects of a rAAV vector expressing hGAA as disclosed herein is within the range of 1.0E⁹ vg/kg to 5.0E¹¹ vg/kg. In some embodiments, the dose administered to a subject is at least about 1.0E⁹ vg/kg, at least about 1.0E¹⁰ vg/kg, at least about 1.0E11 vg/kg, at least about 1.0E12 vg/kg, about 1.1E12 vg/kg, about 1.2E12 vg/kg, about 1.3E12 vg/kg, about 1.4E12 vg/kg, about 1.5E12 vg/kg, about 1.6E12 vg/kg, about 1.7E12 vg/kg, about 1.8E12 vg/kg, about 1.9E12 vg/kg, about 2.0E12 vg/kg, about 3.0E12 vg/kg, about 4.0E12 vg/kg, about 5.0E12 vg/kg, about 6.0E12 vg/kg, about 7.0E12 vg/kg, about 8.0E12 vg/kg, about 9.0E12 vg/kg, about 1.0E13 vg/kg, about 1.2E13 vg/kg, about 1.2E13 vg/kg, about 1.2E13 vg/kg, about 1.3E13 vg/kg, about 1.4E13 vg/kg, about 1.5E13 vg/kg, about 1.6E13 vg/kg, about 1.7E13 vg/kg, about 1.8E13 vg/kg, about 1.9E13 vg/kg, about 2.0E13 vg/kg, about 3.0E13 vg/kg, about 4.0E13 vg/kg, about 5.0E13 vg/kg, about 6.0E13 vg/kg, about 7E13 vg/kg, about 8E13 vg/kg, about 9E13 vg/kg, or about 10E14 vg/kg. In some embodiments the rAAV administration is accompanied with immunomodulators, e.g, prednisone, methotrexate or, a combination thereof. In some embodiments the rAAV of the invention is packaged within AAV XL 32 or AAV XL 32.1 capsid.

[0408] In preferred embodiments, exemplary doses for achieving therapeutic effects according to the methods as disclosed herein are titers of at between 1.2E12 and 4.0E12 vg/kg, for example, least about 1.0E12 vg/kg, about 1.1E12 vg/kg, about 1.2E12 vg/kg, about 1.3E12 vg/kg, about 1.4E12 vg/kg, about 1.5E12 vg/kg, about 1.6E12 vg/kg, about 1.7E12 vg/kg, about 1.8E12 vg/kg, about 1.9E12 vg/kg, about 2.0E12 vg/kg, about 2.1E12 vg/kg, about 2.2E12 vg/kg, about 2.3E12 vg/kg, about 2.4E12 vg/kg, about 2.5E12 vg/kg, about 2.6E12 vg/kg, about 2.7E12 vg/kg, about 2.8E12 vg/kg, about 2.9E12 vg/kg, about 3.0E12 vg/kg, about 3.1E12 vg/kg, about 3.2E12 vg/kg, about 3.3E12 vg/kg, about 3.4E12 vg/kg, about 3.5E12 vg/kg, about 3.6E12 vg/kg, about 3.7E12 vg/kg, about 3.8E12 vg/kg, about 3.9E12 vg/kg, about 4.0E12 vg/kg.

[0409] In preferred embodiments, exemplary doses for achieving therapeutic effects according to the methods as disclosed herein are titers of at between 1.0E11 vg/kg and 5.0E13 vg/kg, for example, 1.0E11 vg/kg, 1.1E11 vg/kg, 1.2E11 vg/kg, 1.3E11 vg/kg, 1.4E11 vg/kg, 1.5E11 vg/kg, 1.6E11 vg/kg, 1.7E11 vg/kg, 1.8E11 vg/kg, 1.9E11 vg/kg, about 1.0E12 vg/kg, about 1.1E12 vg/kg, about 1.2E12 vg/kg, about 1.3E12 vg/kg, about 1.4E12 vg/kg, about 1.5E12 vg/kg, about 1.6E12 vg/kg, about 1.7E12 vg/kg, about 1.8E12 vg/kg, about 1.9E12 vg/kg, about 2.0E12 vg/kg, about 3.0E12 vg/kg, about 4.0E12 vg/kg, about 5.0E12 vg/kg, about 6.0E12 vg/kg, about 7.0E12 vg/kg, about 8.0E12 vg/kg, about 9.0E12 vg/kg, about 1.0E13 vg/kg, about 1.2E13 vg/kg, about 1.2E13 vg/kg, about 1.2E13 vg/kg, about 1.3E13 vg/kg, about 1.4E13 vg/kg, about 1.5E13 vg/kg, about 1.6E13 vg/kg, about 1.7E13 vg/kg, about 1.8E13 vg/kg, about 1.9E13 vg/kg, about 2.0E13 vg/kg, about 3.0E13 vg/kg, about 4.0E13 vg/kg, about 5.0E13 vg/kg.

[0410] In some embodiments, a rAAV vector expressing hGAA as disclosed herein useful for the methods to treat Pompe Diseases, exemplary doses for achieving therapeutic effects are titers of at least about 1.0E12 to 4.0E12 vg/kg, or about 1.2E12 to 3.0E12 vg/kg, or about 1.2E12 to 2.5E12 vg/kg, or about 2.5E12 to 4.0E12 vg/kg.

[0411] In some embodiments, the dosage may be modified by a person of ordinary skill in the art, e.g., the dose administered can be lower than 1.0E12 vg/kg, or lower than about 5.0E11 vg/kg where a stronger promoter than the LSP of SEQ ID NO: 97 is operatively linked to the nucleic acid encoding GAA. In contrast, in alternative embodiments, the dosage may be modified by a person of ordinary skill in the art, e.g., the dose of the rAAV vector administered can be higher than about 1.6E12 vg/kg, or higher than about 5.0E12 vg/kg when a weaker liver-specific promoter than the LSP of SEQ ID NO: 97 used in the AAV8-LSPhGAA vector is operatively linked to the nucleic acid encoding GAA. Exemplary doses for achieving therapeutic effects are titers of at least about 1.0E⁵, 1.0E⁶, 1.0E⁷, 1.0E⁸, 1.0E⁹, 1.0E¹⁰, 1.0E¹¹, 1.0E¹² vg/kg, optionally about 1.0E¹⁰ to about 1.0E¹² transducing units (vg/kg), and optionally does not exceed about 4.0E¹² vg/kg or optionally is about 3.0E¹² transducing units (vg/kg).

[0412] In one embodiment, no percentage of the administered dose of rAAV vector expressing hGAA as disclosed herein is retained in the liver following administration, e.g., at least 1, 2, 3, 4 weeks or more following administration.

[0413] In one embodiment, less than 1%, 2%, 3%, 4%, 5%, 6%, 7%, 8%, 9%, 10%, 11%, 12%, 13%, 14%, 15%, 16%, 17%, 18%, 19%, 20%, 21%, 22%, 23%, 24%, 25%, 26%, 27%, 28%, 29%, 30%, 31%, 32%, 33%, 34%, 35%, 36%, 37%, 38%, 39%, 40%, 41%, 42%, 43%, 44%, 45%, 46%, 47%, 48%, 49%, 50%, 51%, 52%, 53%, 54%, 55%, 56%, 57%, 58%, 59%, 60%, 61%, 62%, 63%, 64%, 65%, 66%, 67%, 68%, 69%, 70%, 71%, 72%, 73%, 74%, 75%, 76%, 77%, 78%, 79%, 80%, 81%, 82%, 83%, 84%, 85%, 86%, 87%, 88%, 89%, 90%, 91%, 92%, 93%, 94%, 95%, 96%, 97%, 98%, 99% of the administered dose of rAAV vector expressing hGAA as disclosed herein is retained in the liver following administration, e.g., at least 1, 2, 3, 4 weeks or more following administration.

[0414] In one embodiment, less than 1.0E⁹ vg/kg to 5.0E¹¹ vg/kg of the administered rAAV vector expressing hGAA as disclosed herein is retained in the liver following administration, e.g., at least 1, 2, 3, 4 weeks or more following administration.

[0415] In one embodiment, less than 1.0E⁹ vg/kg, 1.0E¹⁰ vg/kg, 1.0E11 vg/kg, 1.0E12 vg/kg, 1.1E12 vg/kg, 1.2E12 vg/kg, 1.3E12 vg/kg, 1.4E12 vg/kg, 1.5E12 vg/kg, 1.6E12 vg/kg, 1.7E12 vg/kg, 1.8E12 vg/kg, 1.9E12 vg/kg, 2.0E12 vg/kg, 3.0E12 vg/kg, 4.0E12 vg/kg, 5.0E12 vg/kg, 6.0E12 vg/kg, 7.0E12 vg/kg, 8.0E12 vg/kg, 9.0E12 vg/kg, 1.0E13 vg/kg, 1.2E13 vg/kg, 1.2E13 vg/kg, 1.2E13 vg/kg, 1.3E13 vg/kg, 1.4E13 vg/kg, 1.5E13 vg/kg, 1.6E13 vg/kg, 1.7E13 vg/kg, 1.8E13 vg/kg, 1.9E13 vg/kg, 2.0E13 vg/kg, 3.0E13 vg/kg, 4.0E13 vg/kg, or 5.0E13 vg/kg of the administered rAAV vector expressing hGAA as disclosed herein is retained in the liver following administration, e.g., at least 1, 2, 3, 4 weeks or more following administration.

[0416] In a further embodiment, administration of rAAV vector or rAAV genome according to the methods as disclosed herein to treat a subject with Pompe disease can result in production of a GAA protein with a circulatory half-life of 2 hours, 3 hours, 4 hours, 5 hours, 6 hours, 7 hours, 8 hours, 9 hours, 10 hours, 11 hours, 12 hours, 13 hours, 14 hours, 15 hours, 16 hours, 17 hours, 18 hours, 19 hours, 20 hours, 21 hours, 22 hours, 23 hours, 1 day, 2 days, 3 days, 4 days, 5 days, 6 days, 7 days, 1 week, 2 weeks, 3 weeks, 4 weeks, one month, two months, three months, four months or more.

[0417] In some embodiments, the methods for treatment of Pompe as disclosed herein relate to a single dose of a rAAV expressing hGAA is used to treat a subject in a single administration. However, in some embodiments, the dose of rAAV to be administered can be given to the subject in multiple administrations, e.g., a dose of rAAV can be divided into sub-doses and administered in multiple administrations.

[0418] In some embodiments, it is envisioned that the methods for treatment of Pompe as disclosed herein can comprise multiple administrations of a single dose of a rAAV expressing hGAA, that is, the subject can be treated with a booster administration (i.e., a second, third, fourth, etc.) of a rAAV expressing hGAA after a defined period of time after the initial or first administration. The dose of a booster administration (i.e., 2^{nd}, 3^{rd}, 4^{th}, or 5^{th} etc.) can be the same dose (amount) of rAAV-hGAA administered in the first administration, or can be a higher dose, or a lower dose, depending on the factors above, including, but not limited to, a therapeutically effective dose to achieve any one or more of (i) serum GAA levels indicating steady state of GAA expression, (ii) reduced glycogen levels and/or, maintained glycogen levels within normal range in the muscle, and (iii) one or more Pompe symptoms, including muscle function and/or pulmonary function within clinically stable levels. As disclosed herein, a steady state of GAA expression by the rAAV as disclosed herein is a serum level of GAA at a pharmacological activity range from 165 to ≤2260 nmol/ml/hr or, from 189 to ≤2,260 nmol/mL/hr. Stability of one or more symptoms of Pompe disease can be determined by the clinical stability parameters as disclosed herein, and includes a steady state in the 6 MWT (6-minute walk test) and/or FVC (Forced vital capacity) in two consecutive assessments no less than 3-months apart as disclosed herein. In some embodiments, a clinical stable level of motor function as determined by the 6 MWT is ≤12% decline, or less than a 43-meter decrease from baseline in two consecutive assessments no less than 3-months apart. In some embodiments, a clinical stable level of pulmonary function as determined by the FVC % predicted in an upright position is ≤15% decrease from baseline in two consecutive assessments no less than 3-months apart.

[0419] In an embodiment, the time period of between administration of a first dose, and a subsequent dose (i.e., a booster dose) of a rAAV vector according to the methods for treatment of Pompe as disclosed herein is selected from any of the following: about 4 months, about 6 months, about 7 months, about 8 months, about 9 months, about 12 months, about 18 months, about 24 months, or about 3 years, about 4 years, about 5 years, or more than 5 years

[0420] In another embodiment, administration of a rAAV vector or rAAV genome as disclosed herein for the treatment of Pompe Disease results in an increase in weight by, e.g., at least 0.5 pounds, at least 1 pound, at least 1.5 pounds, at least 2 pounds, at least 2.5 pounds, at least 3 pounds, at least 3.5 pounds, at least 4 pounds, at least 4.5 pounds, at least 5 pounds, at least 5.5 pounds, at least 6 pounds, at least 6.5 pounds, at least 7 pounds, at least 7.5 pounds, at least 8 pounds, at least 8.5 pounds, at least 9 pounds, at least 9.5 pounds, at least 10 pounds, at least 10.5 pounds, at least 11 pounds, at least 11.5 pounds, at least 12 pounds, at least 12.5 pounds, at least 13 pounds, at least 13.5 pounds, at least 14 pounds, at least 14.5 pounds, at least 15 pounds, at least 20 pounds, at least 25 pounds, at least 30 pounds, at least 50 pounds.

[0421] In another embodiment, an AAV GAA of any serotype, as disclosed herein for the treatment of Pompe Disease results in an increase in weight by, e.g., from 0.5 pounds to 50 pounds, from 0.5 pounds to 30 pounds, from 0.5 pounds to 25 pounds, from 0.5 pounds to 20 pounds, from 0.5 pounds to 15 pounds, from 0.5 pounds to ten pounds, from 0.5 pounds to 7.5 pounds, from 0.5 pounds to 5 pounds, from 1 pound to 15 pounds, from 1 pound to 10 pounds, from 1 pound to 7.5 pounds, form 1 pound to 5 pounds, from 2 pounds to ten pounds, from 2 pounds to 7.5 pounds.

### B. Withdrawal of Long-Term ERT

[0422] Treatment of Pompe disease is normally by administration of long-term enzyme replacement therapy (ERT) with recombinant human acid α-glucosidase (rhGAA) and has previously reported to prolong survival of both LOPD and IOPD patients through improvement in pulmonary and muscle function. However, Schoser et al, report that after a period of stabilization, both these parameters continue to decline over time (see Schoser et al., 2017 Neurol, 264: 621-30). Additionally, ERT with recombinant GAA protein has numerous disadvantages, including but not limited to, short-half life of the administered recombinant GAA in the blood, lack of efficient skeletal muscle uptake, potential for high titer antibody response and even some patients failing to respond to ERT, and rigorous administration of a recombinant GAA infusion every 2 weeks, that can take between 5-8 hours. Moreover, while disease progression is slowed compared with untreated subjects, the benefits of ERT may not be long-lasting, and many patients die or remain weak despite treatment compliance (Tarnopolsky et al. 2016 Can J Neurol Sci, 43: 472-85).

[0423] The waning efficacy in subjects receiving recombinant GAA protein ERT is partially explained by an immune response to ERT where high, sustained anti-GAA antibody titers (HSAT) are formed. Subjects with HSAT demonstrated greatly increased mortality, in comparison with patients who formed no or only low titer antibodies (Banugaria et al. 2011). Furthermore, the ability to prevent antibody formation in subjects at risk for HSAT with immunosuppression, which significantly prolonged survival, confirmed the clinical relevance of HSAT (Mendelsohn et al. 2009; Banugaria et al. 2013; Kazi et al. 2017).

[0424] Subjects with Pompe's disease are considered as cross-reactive immunologic material (CRIM) positive if they have residual GAA enzyme activity and CRIM negative if no residual GAA activity is detected. Based on pooled clinical studies data, 28% of Pompe's disease cases are infantile-onset, of which about 85% are classic infantile-onset and three quarters of those are CRIM positive (Kemper, Comeau, and Green 2013). Determination of CRIM status in newly diagnosed IOPD patients is important since it allows for the institution of preventive immunomodulatory measures before beginning ERT, thus offsetting the worst damaging effects of HSAT. CRIM-negative Pompe disease subjects produced HSAT and demonstrated markedly reduced efficacy from ERT with rhGAA (Amalfitano et al. 2001). In the first pilot study of ERT in Pompe disease using Chinese hamster ovary cell-derived rhGAA, the two subjects who were CRIM-negative produced higher titers of anti-GAA antibodies than the third subject who was CRIM-positive. This corresponded with a markedly reduced efficacy of ERT in the CRIM-negative subjects. The relevance of antibody formation to efficacy of therapy in Pompe disease has been emphasized by the poor response of CRIM-negative subjects to ERT, which correlated with the onset of HSAT (Kishnani et al. 2010).

[0425] While no LOPD subjects are CRIM negative, some mount high antibody responses to rhGAA capable of interfering with optimal efficacy of ERT (Patel et al. 2012; de Vries et al. 2017; “LUMIZYME Prescribing Information” 2014). In addition, all Pompe subjects mount some level of anti-GAA antibody response with unknown effects on ERT efficacy.

[0426] In some embodiments, the rAAV vectors expressing a GAA polypeptide as disclosed herein can be used in methods to treat subjects with Pompe disease, and comprises administering a AAV expressing hGAA as disclosed herein that enables the subject to have an extended period of cessation of the administration of long-term ERT. In particular, rAAV vectors expressing a GAA polypeptide as disclosed herein can be administered to a subject with Pompe disease that enables them to have the ability to reduce, or eliminate the clinical need for long-term hGAA ERT administration for an extended period of time.

[0427] Accordingly, another aspect of the technology disclosed herein relates to a method to treat Pompe Disease by administrating to the subject with Pompe disease a composition comprising a rAAV vector expressing a GAA polypeptide as disclosed herein, where in some embodiments, the methods enable subjects with Pompe disease to withdraw from, or stop long-term administration of recombinant human GAA (rhGAA) ERT, which is normally administered on a weekly or every-other week regimen. In some embodiments, the methods disclosed herein enable a subject with Pompe disease to take breaks from the normal ERT regimen for extended period of time (e.g., extended periods of ERT cessation) if the subject is administered a specific dose of AAV vector expressing a GAA polypeptide as disclosed herein. In some embodiments, withdrawal of the administration of long-term ERT begins at about the time of administration of the AAV vector to the subject (e.g., the day before, the day of, or the day after), or in some embodiments, withdrawal of the administration of long-term ERT can occur at about 24 weeks, or anywhere within about 24 weeks to about 26 weeks after administration of the AAV vector.

[0428] As disclosed herein, “long-term ERT” refer to the standard-of-care (SOC) treatment for a subject with Pompe disease, including IOPD and LOPD, and is normally a regimen of intravenous administration of recombinant human alglucisudease alfa protein (rhGAA) to the subject on a regular and frequent basis, e.g., every week or every 2 weeks, without any breaks in the regimen, and where the administered rhGAA protein provides an exogenous source of GAA. MYOZYME® (alglucosidase alfa) which was first US approved product (2006) for the treatment of Pompe disease and LUMIZYME® (alglucosidase alfa) which was approved in 2010 are exemplary current standard-of-care (SOC) treatments for infantile-onset and late-onset Pompe patients. The normal long-term ERT administration regimen is intravenously administration of Alglucosidase alfa every 2 weeks as an infusion at a dose of 20 mg/Kg (LUMIZYME Prescribing Information 2014).

[0429] As disclosed herein, in some embodiments, the methods as disclosed herein by administering a AAV expressing hGAA as disclosed herein enable the withdrawal or cessation of administration of long-term ERT for an extended period of time. In some embodiments, the extended period of time is at least about 3-months, or at least about 6-months, or at least about 1 year, or longer than 1 year.

[0430] As disclosed herein, “extended period” of time, as referred to in reference to time period that administration of long-term ERT is stopped, refers to a time period that is longer than 1 month, and in some embodiments is a time period longer than if up to 5 administrations of ERT are missed.

[0431] Accordingly, in some embodiments, the methods to treat a subject with Pompe Disease with a AAV expressing hGAA as disclosed herein comprises administering to the subject a pharmaceutical composition comprising a AAV expressing GAA and where the subject is not administered long-term GAA enzyme replacement therapy (ERT) for an extended period of time. In some embodiments, the cessation or withdrawal of administration of long-term ERT occurs anywhere between 1-2 days of administration and at least 24 weeks after the administration of the AAV-GAA vector. That is, in some embodiments, the subject being treated can stop the administration of ERT on the day of, or the day before or after administration of AAV-GAA. In some embodiments, the subject being treated according to the methods as disclosed herein can stop ERT after about 1 week, or about 2 weeks, or about 3 weeks, or about 1 month, or about 2 months, or about 3 months, or about 4 months, or about 5 months, or about 6 months after the administration of the AAV-GAA.

[0432] The exact timeframe for stopping ERT, or for ERT cessation, by each subject according to the methods as disclosed herein can be determined by an ordinary skilled practitioner, but without wishing to be limited by theory, encompassed herein is a method to treat a subject with Pompe disease by administering a AAV expressing hGAA as disclosed herein, where ERT is stopped at time point that the serum GAA levels achieved from expression by the AAV-hGAA is near or about a serum level of within a pharmacological activity range of at least 165 nmol/ml/hr or, of at least 189 nmol/ml/hr, for example, between 189 to ≤2,260 nmol/mL/hr. In some embodiments, encompassed herein is a method where ERT is stopped at time point that the serum GAA levels achieved from expression by the AAV-hGAA is within 50%, or within 60%, or within 70% or within 80% of a serum level of within a pharmacological activity range of between 189 nmol/mL/hr. In some embodiments, encompassed herein is a method to treat Pompe disease by administering a AAV expressing a hGAA polypeptide as disclosed herein, where ERT is stopped at time point that the serum GAA levels achieved from expression by the AAV-hGAA is within 50%, or within 60%, or within 70% or within 80% of a serum level of within a pharmacological activity range of between 165 to about 2000 nmol/mL/hr.

[0433] In some embodiments, encompassed herein is a method to treat Pompe disease by administering a AAV expressing a hGAA polypeptide as disclosed herein, where ERT is stopped at time point that the serum GAA levels achieved from a normal ERT regimen are replaced with a GAA serum level achieved from expression by the AAV-hGAA. For example, as the serum GAA levels due to the recombinant hGAA from the last ERT administration declines, there is a concurrent increase in serum GAA levels achieved from expression by the AAV-hGAA, so that ERT withdrawal or cessation does not result in a decline in clinical stability of one or more symptoms of Pompe disease in the subject, as measured by the 6 MWT or FVC according to the methods as disclosed herein. For illustration purposes only, in some embodiments, ERT withdrawal or cessation occurs when the administered AAV-hGAA results in the expressed GAA to achieve a serum GAA level for clinical stability of one or more symptoms of Pompe disease in the subject, for example, a clinical stable level of motor function as determined by the 6 MWT is ≤12% decline, or less than a 43-meter decrease from baseline in two consecutive assessments no less than 3-months apart, or a clinical stable level of pulmonary function as determined by the FVC % in an upright position is ≤15% decrease from baseline in two consecutive assessments no less than 3-months apart, therefore making superfluous the recombinant hGAA from the last ERT administration.

[0434] In some embodiments, the method to treat Pompe disease by administering a AAV expressing a hGAA polypeptide as disclosed herein enables long term cessation of ERT for a period of about 1 year, or about 15 months, or about 18 months, or about 24 months, or about 30 months or more than 30 months while maintaining clinical stable with one or more symptoms of Pompe disease, as measured by 6 MWT and/or % FVC, as disclosed herein.

[0435] Accordingly, the rAAV vectors encoding a GAA polypeptide as disclosed herein and the methods as disclosed herein provide significant advantages to subjects with Pompe disease, including but not limited to reducing or eliminating the rigorous and arduous weekly, or every-other week infusions of long-term rhGAA ERT treatment, which are significantly time-consuming and geographically limiting, and hinders a patient with Pompe disease from travelling for prolonged periods from areas where their ERT infusions are administered. Additionally, as disclosed herein, the absence of ERT administration also reduces any side effects due to anti-rhGAA antibodies against the ERT, and also circumvents the need for administration of immune suppressants normally co-administered with the ERT. As such, the methods to treat Pompe disease by administering a AAV expressing a hGAA polypeptide as disclosed herein leads to greater flexibility in Pompe treatment and an improvement in quality of life and lifestyle of subjects with Pompe disease.

### C. Administration of Complementary ERT

[0436] In some embodiments, the method to treat Pompe disease by administering a AAV expressing a hGAA polypeptide as disclosed herein enables a subject to have breaks or “holidays” from the normal regimen of administration long-term ERT. That is, according to the methods as disclosed herein, a subject who is administered an AAV vector expressing GAA as disclosed herein can take extended periods of time in the absence of administration of long-term ERT. Moreover, in some embodiments, a subject administered a AAV vector expressing GAA as disclosed herein, can, after an initial period of withdrawal of the administration of long-term ERT for an extended period of time, be administered complementary ERT, where the complementary ERT is administered after about 6-months, or about 1 year, or longer than a year of cessation of the long-term ERT. Accordingly, the methods to treat Pompe disease by administering a AAV expressing a hGAA polypeptide as disclosed herein enable flexibility in normal long-term ERT administration regimens, allowing both extended breaks or absence of administration of long-term ERT which does not result in a clinical decline—that is, a subject remains clinically stable despite not having ongoing long-term ERT administration for an extended period of time.

[0437] In some embodiments, the methods to treat Pompe disease by administering a AAV expressing a hGAA polypeptide as disclosed herein encompass re-administration of ERT (herein referred to as “complementary ERT”) after an extended period of time of cessation of ERT administration, and enable flexibility in normal ERT regimen, as the continued production of GAA expressed by the AAV permits include ERT flexibility. In some embodiments, the complementary ERT is pulse administration of ERT, as disclosed herein. In some embodiments, the complementary ERT is at less frequent intervals, or at a lower dose, or at irregular doses, or at irregular intervals as compared to the prior administration of long-term ERT.

[0438] In some embodiments, the methods to treat Pompe disease by administering a AAV expressing a hGAA polypeptide as disclosed herein encompass recommencement of ERT (herein referred to as “complementary ERT”) after an extended period of at least 6 months to about 1 year of absence of long-term ERT administration. In some embodiments, complementary ERT can be for a short-period of time, and can be followed by a second extended period of ERT administration cessation. In some embodiments, complementary ERT can be for a period of anywhere between 3 months to about 2 years, for example, about 3 months, 4 months, 5 months, 6 months, 7 months, 8 months, 9 months, 10 months, 11 months, or for about 1 year.

[0439] In some embodiments, the methods to treat Pompe disease by administering a AAV expressing a hGAA polypeptide as disclosed herein encompasses administering a rAAV expressing GAA according to as subject with Pompe, wherein administration of long-term ERT continues after administration of the recombinant AAV. However, the ERT is at a lower dose and/or frequency than before the administration of the recombinant AAV vector. For example, after administration of the AAV vector, long-term ERT can be administered every 3 weeks, once a month, bimonthly, once every 3 months, every 4 months, every 5 months, every 6 months for at least 24 weeks after administration of the AAV-GAA. Dosage of the long-term ERT can be reduced in one embodiment. In one method, a pulse administration regimen of long-term ERT after administration of the AAV vector can be used so that an irregular dosing schedule and/or amount can be used. As discussed herein, in some embodiments, administration of long-term ERT can be withdrawn at 24 weeks, or earlier as disclosed herein.

[0440] In some embodiments, due to continued expression of GAA by the administered AAV vector, the methods disclosed herein enable flexibility of administration of both long-term ERT or complementary ERT, such that if a subject plans to miss, or inadvertently or accidently misses one or more ERT administrations of a long-term ERT or complementary ERT regimen, the subject will maintain clinical stability. Currently, if ERT is missed, a much larger amount of ERT is needed to return to the same clinical level.

[0441] In some embodiments, the complementary ERT is at less frequent administration intervals, or at a lower dose, or at irregular doses, or at irregular administration intervals as compared to the prior administration of long-term ERT. For example, in some embodiments, the dose of rhGAA administered in a complementary ERT is less than 80%, less than 75%, less than 70%, less than 65%, less than 60%, less than 55%, less than 50%, less than 45%, less than 40%, less than 35%, less than 30%, less than 25%, less than 20%, less than 15%, less than 10%, less than 5%, less than 2%, or less than 1% of the normal dose of the rhGAA administered in a long-term ERT regimen.

[0442] In some embodiments, the complementary ERT is administered as pulse administration. In alternative embodiments, as a subject administered the rAAV vector compositions as disclosed herein can take breaks or interruptions from the regular dosing regimen of the long-term ERT administration or complementary ERT, where the long-term ERT or complementary ERT are administered by pulse administration. For example, in some embodiments, the administration of the long-term ERT or complementary ERT can be administered by pulsed administration. In certain embodiments, a subject administered the compositions can have pulsed administration of the long-term ERT or complementary ERT.

[0443] In certain embodiments, pulsed administration of the complementary ERT is suitable provided the subject has been administered the AAV vector composition as disclosed herein at a sufficient dose for continuous expression of GAA to maintain clinical stability and/or maintain a serum GAA level at or above 189 n mol/hr* (e.g., during the entire duration of the ERT break or “ERT holiday” where the regularly scheduled ERT is not administered). In certain embodiments, the methods disclosed herein allows a subject to undergo pulsed administration of complementary ERT for the lifetime of the subject.

[0444] In some embodiments, the regimen of administration of the complementary ERT can have intermittent breaks, where the administration of ERT is halted (e.g., the duration of the break or “ERT holiday” where the regimen of administration of ERT is halted).

[0445] In some embodiments, the methods encompass administration of complementary ERT by pulsed administration, where the pulsed administration of complementary ERT occurs least once a month, at least every other month, or at least every 6 months, or at least every year, or every other year. As the methods disclosed herein comprise administering a AAV vector at a sufficient dose for continuous expression of GAA in the subject and to maintain a serum GAA level at or above 189 n mol/hr*, if complementary ERT is administered, pulsed administration can substantially reduce the amount of ERT administered to the patient per dose or per total treatment regimen with an increased effectiveness, and allows for increased flexibility in a ERT administration regimen. This represents a significant saving in time, effort and expense and, more importantly, improved quality of life for Pompe patients, as well as a lower ERT dose which can lessens any side effects, including anti-GAA antibodies to the administered rhGAA protein.

[0446] In some embodiments, administration of complementary ERT is a pulsed administration. In certain embodiments, a pulsed administration comprises administering complementary ERT for about 8 weeks, followed by not administering complementary ERT for about 4 weeks. In some embodiments, the pulsed administration comprises administering complementary ERT for about 6 weeks (i.e., 6 weekly infusions, or 3 infusions every 2 weeks), followed by not administering a complementary ERT for about 2 weeks. In certain embodiments, the pulsed administration comprises administering complementary ERT for about 4 weeks, followed by not administering complementary ERT for about 2 weeks. In some embodiments, the pulsed administration comprises administering complementary ERT for about 2 weeks, followed by not administering complementary ERT for about 2 weeks.

### D. Absence of Long-Term Immune Suppression

[0447] In another aspect, the technology relates to methods to treat Pompe disease by administering a AAV expressing a hGAA polypeptide as disclosed herein, where the administration of a composition comprising a AAV-GAA vector is administered to the subject without ongoing immune suppression. That is, in some embodiments, immune suppression is not administered to the subject long term.

[0448] In some embodiments, an immune suppressant or immune modulator is administered to the subject intermittently, or for a transient period, e.g., as an immune prophylaxis to the subject to prevent or reduce any immune response to the administered AAV vector, therefore allowing, if necessary, a subsequent or booster administration of the AAV vector expressing GAA according to the methods as disclosed herein.

[0449] In some embodiments, an immune modulator is administered for an initial period at, or around the time the AAV vector expressing GAA as disclosed herein is administered to the subject. For example, an immune modulator is administered starting at about 24 hrs before AAV vector expressing GAA is administered to the subject. In some embodiments, an immune modulator is administered starting at about 24 hrs before AAV administration and is administered for at least 1 day, or at least 2 days, or at least 3 days or at least 4 days, or at least 5 days, or at least 6 days, or for about 1 week, or for longer than 1 week after administration of the AAV vector expressing GAA. In some embodiments, an immune modulator is administered starting at, or about 24 hrs before AAV administration and is administered for no more than 1 day, or 2 days, 3 days, or 4 days, or 5 days, or 6 days, or for 1 week, or for 2 weeks, or for 3 weeks or for 1 month after administration of the AAV vector expressing GAA.

[0450] In some embodiments, an immune modulator is administered to the subject at tapering lower doses, e.g., at a first dose for a first period of time, at a second lower dose for a second period of time, and third dose that is lower than the second dose—for a third period of time, and so forth until no immune response to the AAV or GAA is produced. For example, in some embodiments, the first dose of an immune modulator is started at, or about 24 hrs before AAV administration and is administered for at least 1 day, or at least 2 days, or at least 3 days or at least 4 days, or at least 5 days, or at least 6 days, or for about 1 week, or about 2 weeks, or about 3 weeks, or about 4 weeks, after which the immune modulator is reduced to a third dose (which is lower than the second dose) for a third period of time (e.g., for at least 1 day, or at least 2 days, or at least 3 days or at least 4 days, or at least 5 days, or at least 6 days, or for about 1 week).

[0451] For exemplary purposes only, in some embodiments, the methods to treat Pompe Disease as disclosed herein comprise administering prednisone as an immune suppressant, i.e., immune prophylaxis, at a first dose of 60 milligrams (given orally) starting 24 hours prior to AAV vector administration. In some embodiments, prednisone is continued at 60 mg/day po through the completion of week four after vector administration, after which, at the beginning of week 5 the prednisone dose is tapered to a second dose level of 55 mg/day po and maintained for 7 days. In some embodiments, at the Beginning of week 6 the dose is tapered to a third dose level of 50 mg/day po and maintained for 7 days etc., so that the dose of the immune suppressant (i.e., prednisone) is tapered on a weekly basis by 5 mg/day, after an initial immune suppressant dose for 4 weeks.

[0452] The use of prednisone is exemplified herein as an immune suppressant for immune prophylaxis according to the methods as disclosed herein. However, it is envisioned that prednisone can be readily substituted with a different immune modulator and administration regimen known by a person of ordinary skill in the art.

[0453] In some embodiments, normal immune prophylaxis for preventing immune reactivity to the expressed GAA is stopped, or withdrawn on day 1, or shortly before or after administration of the rAAV expressing GAA according to the methods as disclosed herein.

### (i) Immune Modulation and Immunosuppression:

[0454] As disclosed herein, in some embodiments, the methods to treat Pompe disease by administering a AAV expressing a hGAA polypeptide as disclosed herein to the subject without ongoing immune suppression. That is, in some embodiments, immune suppression is not administered to the subject long term, and is only administered for a short and pre-defined period, including an initial period (with an initial dose) and a tapering period (with incremental tapering doses) after the administration of the AAV vector expressing GAA to the subject. Accordingly, in some embodiments, the immune suppression is administered for between 4 weeks to up to about 15 weeks after the administration of the AAV vector expressing GAA to the subject, and can be administered in an initial and tapering doses as disclosed herein.

[0455] Accordingly, in some embodiments, the methods and compositions using the AAV vectors and AAV genomes as described herein, for treating Pompe, further comprises administering an immune modulator for an initial period followed by a tapering period. In some embodiments, the immune modulator can be administered at the time of rAAV vector administration, before rAAV vector administration or, after the rAAV vector administration.

[0456] In any embodiment of the methods and compositions as disclosed herein, a subject being administered a rAAV vector or rAAV genome as disclosed herein is also administered an immunosuppressive agent. Various methods are known to result in the immunosuppression of an immune response of a patient being administered AAV. Methods known in the art include administering to the patient an immunosuppressive agent, such as a proteasome inhibitor. One such proteasome inhibitor known in the art, for instance as disclosed in U.S. Pat. No. 9,169,492 and U.S. patent application Ser. No. 15/796,137, both of which are incorporated herein by reference, is bortezomib.

[0457] In another embodiment, an immunosuppressive agent can be an antibody, including polyclonal, monoclonal, scfv or other antibody derived molecule that is capable of suppressing the immune response, for instance, through the elimination or suppression of antibody producing cells. In a further embodiment, the immunosuppressive element can be a short hairpin RNA (shRNA). In such an embodiment, the coding region of the shRNA is included in the rAAV cassette and is generally located downstream, 3′ of the poly-A tail. The shRNA can be targeted to reduce or eliminate expression of immunostimulatory agents, such as cytokines, growth factors (including transforming growth factors β1 and β2, TNF and others that are publicly known).

[0458] In some embodiments, the immune modulator is an immunoglobulin degrading enzyme such as IdeS, IdeZ, IdeS/Z, Endo S, or, their functional variant. Non-limiting examples of references of such immunoglobulin degrading enzymes and their uses as described in U.S. Pat. Nos. 7,666,582, 8,133,483, US 20180037962, US 20180023070, US 20170209550, U.S. Pat. No. 8,889,128, WO2010/057626, U.S. Pat. Nos. 9,707,279, 8,323,908, US 20190345533, US 20190262434, and WO2020/016318, each of which are incorporated in their entirety by reference.

[0459] In some embodiments, the immune modulator or immunosuppressive agent is a proteasome inhibitor. In certain aspects, the proteasome inhibitor is Bortezomib. In some aspects of the embodiment, the immune modulator comprises bortezomib and anti CD20 antibody, Rituximab. In other aspects of the embodiment, the immune modulator comprises bortezomib, Rituximab, methotrexate, and intravenous gamma globulin. Non-limiting examples of such references, disclosing proteasome inhibitors and their combination with Rituximab, methotrexate and intravenous gamma globulin, as described in U.S. Pat. Nos. 10,028,993, 9,592,247, and, U.S. Pat. No. 8,809,282, each of which are incorporated in their entirety by reference. One such proteasome inhibitor known in the art, for instance as disclosed in U.S. Pat. No. 9,169,492 and U.S. patent application Ser. No. 15/796,137, both of which are incorporated herein by reference, is bortezomib.

[0460] In another embodiment, an immunosuppressive agent can be an antibody, including polyclonal, monoclonal, scfv or other antibody derived molecule that is capable of suppressing the immune response, for instance, through the elimination or suppression of antibody producing cells. In a further embodiment, the immunosuppressive element can be a short hairpin RNA (shRNA). In such an embodiment, the coding region of the shRNA is included in the rAAV cassette and is generally located downstream, 3′ of the poly-A tail. The shRNA can be targeted to reduce or eliminate expression of immunostimulatory agents, such as cytokines, growth factors (including transforming growth factors β1 and β2, TNF and others that are publicly known).

[0461] In alternative embodiments, the immune modulator is an inhibitor of the NF-kB pathway. In certain aspects of the embodiment, the immune modulator is Rapamycin or, a functional variant. Non-limiting examples of references disclosing rapamycin and its use described in U.S. Pat. No. 10,071,114, US 20160067228, US 20160074531, US 20160074532, US 20190076458, U.S. Pat. No. 10,046,064, are incorporated in their entirety. In other aspects of the embodiment, the immune modulator is synthetic nanocarriers comprising an immunosuppressant. Non limiting examples of references of immunosuppresants, immunosuppressants coupled to synthetic nanocarriers, synthetic nanocarriers comprising rapamycin, and/or, toloregenic synthetic nanocarriers, their doses, administration and use as described in US20150320728, US 20180193482, US 20190142974, US 20150328333, US20160243253, U.S. Pat. No. 10,039,822, US 20190076522, US 20160022650, U.S. Pat. Nos. 10,441,651, 10,420,835, US 20150320870, US 2014035636, U.S. Pat. Nos. 10,434,088, 10,335,395, US 20200069659, U.S. Pat. No. 10,357,483, US 20140335186, U.S. Pat. Nos. 10,668,053, 10,357,482, US 20160128986, US 20160128987, US 20200038462, US 20200038463, each of which are incorporated in their entirety by reference.

[0462] In some embodiments, the immune modulator is synthetic nanocarriers comprising rapamycin (ImmTOR™ nanoparticles) (Kishimoto, et al., 2016, Nat Nanotechnol, 11(10): 890-899; Maldonado, et al., 2015, PNAS, 112(2): E156-165), as disclosed in US20200038463, U.S. Pat. No. 9,006,254 each of which is incorporated herein in its entirety. In some embodiments, the immune modulator is an engineered cell, e.g., an immune cell that has been modified using SQZ technology as disclosed in WO2017192786, which is incorporated herein in its entirety by reference.

[0463] In some embodiments, the immune modulator is selected from the group consisting of poly-ICLC, 1018 ISS, aluminum salts, Amplivax, AS15, BCG, CP-870,893, CpG7909, CyaA, dSLIM, GM-CSF, IC30, IC31, Imiquimod, ImuFact IMP321, IS Patch, ISS, ISCOMATRIX, Juvlmmune, LipoVac, MF59, monophosphoryl lipid A, Montanide IMS 1312, Montanide ISA 206, Montanide ISA 50V, Montanide ISA-51, OK-432, OM-174, OM-197-MP-EC, ONTAK, PEPTEL, vector system, PLGA microparticles, resiquimod, SRL172, Virosomes and other Virus-like particles, YF-17D, VEGF trap, R848, beta-glucan, Pam3Cys, and Aquila's QS21 stimulon. In another further embodiment, the immunomodulator or adjuvant is poly-ICLC.

[0464] In some embodiments, the immune modulator is a small molecule that inhibit the innate immune response in cells, such as chloroquine (a TLR signaling inhibitor) and 2-aminopurine (a PKR inhibitor), can also be administered in combination with the composition comprising at least one rAAV as disclosed herein. Some non-limiting examples of commercially available TLR-signaling inhibitors include BX795, chloroquine, CLI-095, OxPAPC, polymyxin B, and rapamycin (all available for purchase from INVIVOGEN™). In addition, inhibitors of pattern recognition receptors (PRR) (which are involved in innate immunity signaling) such as 2-aminopurine, BX795, chloroquine, and H-89, can also be used in the compositions and methods comprising at least one rAAV vector as disclosed herein for in vivo protein expression as disclosed herein.

[0465] In some embodiments, a rAAV vector can also encode a negative regulators of innate immunity such as NLRX1. Accordingly, in some embodiments, a rAAV vector can also optionally encode one or more, or any combination of NLRX1, NS1, NS3/4A, or A46R. Additionally, in some embodiments, a composition comprising at least one rAAV vector as disclosed herein can also comprise a synthetic, modified-RNA encoding inhibitors of the innate immune system to avoid the innate immune response generated by the tissue or the subject.

[0466] In some embodiments, an immune modulator for use in the administration methods as disclosed herein is an immunosuppressive agent. As used herein, the term “immunosuppressive drug or agent” is intended to include pharmaceutical agents which inhibit or interfere with normal immune function. Examples of immunosuppressive agents suitable with the methods disclosed herein include agents that inhibit T-cell/B-cell costimulation pathways, such as agents that interfere with the coupling of T-cells and B-cells via the CTLA4 and B7 pathways, as disclosed in U.S. Patent Pub. No 2002/0182211. In one embodiment, an immunosuppressive agent is cyclosporine A. Other examples include myophenylate mofetil, rapamicin, and anti-thymocyte globulin. In one embodiment, the immunosuppressive drug is administered in a composition comprising at least one rAAV vector as disclosed herein, or can be administered in a separate composition but simultaneously with, or before or after administration of a composition comprising at least one rAAV vector according to the methods of administration as disclosed herein. An immunosuppressive drug is administered in a formulation which is compatible with the route of administration and is administered to a subject at a dosage sufficient to achieve the desired therapeutic effect. In some embodiments, the immunosuppressive drug is administered transiently for a sufficient time to induce tolerance to the rAAV vector as disclosed herein.

[0467] Various methods are known to result in the immunosuppression of an immune response of a patient being administered AAV. Methods known in the art include administering to the patient an immunosuppressive agent, such as a proteasome inhibitor. One such proteasome inhibitor known in the art, for instance as disclosed in U.S. Pat. No. 9,169,492 and U.S. patent application Ser. No. 15/796,137, both of which are incorporated herein by reference, is bortezomib. In some embodiments, an immunosuppressive agent can be an antibody, including polyclonal, monoclonal, scfv or other antibody derived molecule that is capable of suppressing the immune response, for instance, through the elimination or suppression of antibody producing cells. In a further embodiment, the immunosuppressive element can be a short hairpin RNA (shRNA). In such an embodiment, the coding region of the shRNA is included in the rAAV cassette and is generally located downstream, 3′ of the poly-A tail. The shRNA can be targeted to reduce or eliminate expression of immunostimulatory agents, such as cytokines, growth factors (including transforming growth factors β1 and β2, TNF and others that are publicly known).

[0468] The use of such immune modulating agents facilitates the ability to for one to use multiple dosing (e.g., multiple administration) over numerous months and/or years. This permits using multiple agents as discussed below, e.g., a rAAV vector encoding multiple genes, or multiple administrations to the subject.

[0469] In some aspects of the invention, the recombinant AAV comprising a nucleic acid encoding human GAA is produced by the triple transfection method that uses close ended linear duplexed DNA molecules that lack bacterial backbone sequences, for example, as described in PCT/US2021/013689, published as WO/2021/146591, which is incorporated herein by reference in its entirety. In some embodiments, the rAAV of the invention is manufactured using plasmid DNA as starting material. In several embodiments, the rAAV of the invention is manufactured using close ended linear duplexed DNA as starting material. Non-limiting examples of close ended linear duplex nucleic acids include doggy bone DNA (dbDNA) or dumbbell-shaped DNA. The close ended linear duplex nucleic acids may be generated within cells or using in vitro cell free system. Cell free in vitro synthesis of dumbbell-shaped DNA and doggy bone DNA are described in U.S. Pat. No. 6,451,563; Efficient production of superior dumbbell-shaped DNA minimal vectors for small hairpin RNA expression-Nucleic Acids Res. 2015 Oct. 15; 43(18): e120; High-Purity Preparation of a Large DNA Dumbbell-Antisense & nucleic acid drug development 11:149-153 (2001); U.S. Pat. Nos. 9,109,250; 9,499,847; 10,501,782; and WO 2018033730 A1; all of which are herein incorporated by reference in their entireties. DNA from cell free in vitro synthesis is devoid of any prokaryotic DNA modifications (e.g., is substantially free of bacterial DNA).

[0470] One example of an in vitro process for producing a closed linear DNA (e.g., containing the ITRs described herein) comprises (a) contacting a DNA template flanked on either side by a protelomerase target sequence with at least one DNA polymerase in the presence of one or more primers under conditions promoting amplification of said template; and (b) contacting amplified DNA produced in (a) with at least one protelomerase under conditions promoting formation of a closed linear expression cassette DNA. The closed linear DNA may be a closed DNA expression cassette DNA product that may comprise, consist or consist essentially of a eukaryotic promoter operably linked to a coding sequence of interest and optionally, a eukaryotic transcription termination sequence. The closed linear expression cassette DNA product may additionally lack one or more bacterial or vector sequences, typically selected from the group consisting of: (i) bacterial origins of replication; (ii) bacterial selection markers (typically antibiotic resistance genes) and (iii) unmethylated CpG motifs.

### E. Pharmaceutical Compositions

[0471] The rAAV vectors as disclosed herein for use in the methods of administration as disclosed herein can be formulated in a pharmaceutical composition with a pharmaceutically acceptable excipient, i.e., one or more pharmaceutically acceptable carrier substances and/or additives, e.g., buffers, carriers, excipients, stabilizers, etc. The pharmaceutical composition may be provided in the form of a kit. Pharmaceutical compositions comprising the rAAV vectors as disclosed herein for use in the methods of administration as disclosed herein and uses thereof are known in the art.

[0472] Accordingly, a further aspect of the invention provides a pharmaceutical composition comprising a rAAV vector as disclosed herein for use in the methods of administration as disclosed herein. Relative amounts of the active ingredient (e.g., a rAAV vectors aa disclosed herein), a pharmaceutically acceptable excipient, and/or any additional ingredients in a pharmaceutical composition in accordance with the present disclosure may vary, depending upon the identity, size, and/or condition of the subject being treated and further depending upon the route by which the composition is to be administered. For example, the composition may comprise between 0.1 percent and 99 percent (w/w) of the active ingredient. By way of example, the composition may comprise between 0.1 percent and 100 percent, e.g., between 0.5 and 50 percent, between 1-30 percent, between 5-80 percent, at least 80 percent (w/w) active ingredient.

[0473] The pharmaceutical compositions can be formulated using one or more excipients or diluents to (1) increase stability; (2) increase cell transfection or transduction; (3) permit the sustained or delayed release of the payload; (4) alter the biodistribution (e.g., target the viral particle to specific tissues or cell types); (5) increase the translation of encoded protein; (6) alter the release profile of encoded protein and/or (7) allow for regulatable expression of the payload of the invention. In some embodiments, a pharmaceutically acceptable excipient may be at least 95 percent, at least 96 percent, at least 97 percent, at least 98 percent, at least 99 percent, or 100 percent pure. In some embodiments, an excipient is approved for use for humans and for veterinary use. In some embodiments, an excipient may be approved by United States Food and Drug Administration. In some embodiments, an excipient may be of pharmaceutical grade. In some embodiments, an excipient may meet the standards of the United States Pharmacopoeia (USP), the European Pharmacopoeia (EP), the British Pharmacopoeia, and/or the International Pharmacopoeia. Excipients, as used herein, include, but are not limited to, any and all solvents, dispersion media, diluents, or other liquid vehicles, dispersion or suspension aids, surface active agents, isotonic agents, thickening or emulsifying agents, preservatives, and the like, as suited to the particular dosage form desired. Various excipients for formulating pharmaceutical compositions and techniques for preparing the composition are known in the art (see Remington: The Science and Practice of Pharmacy, 21 st Edition, A. R. Gennaro, Lippincott, Williams and Wilkins, Baltimore, MD, 2006; incorporated herein by reference in its entirety). The use of a conventional excipient medium may be contemplated within the scope of the present disclosure, except insofar as any conventional excipient medium may be incompatible with a substance or its derivatives, such as by producing any undesirable biological effect or otherwise interacting in a deleterious manner with any other component(s) of the pharmaceutical composition.

### Compositions/Formulations

[0474] The rAAV vectors as disclosed herein can be formulated in a composition. For example, the rAAV vectors as disclosed herein can be formulated in a pharmaceutical composition with a pharmaceutically acceptable excipient, i.e., one or more pharmaceutically acceptable carrier substances and/or additives, e.g., buffers, carriers, excipients, stabilisers, etc. The composition, e.g., the pharmaceutical composition may be provided in the form of a kit. It is noted the terms “composition” and “formulation” are used interchangeably here.

[0475] Accordingly, in one aspect, provided herein is a composition comprising the recombinant AAV vector particles described herein. Generally, the composition comprises the recombinant AAV vector particles described herein at a concentration from about 1e⁹ vg/ml to about 1e¹⁵ vg/ml. In some embodiments, the composition comprises the recombinant AAV vector particles described herein at a concentration from about 1e¹⁰ vg/ml to about 1e¹⁴ vg/ml. In some embodiments, the composition comprises the recombinant AAV vector particles described herein at a concentration from about 1e¹² vg/ml to about 1e¹⁰ vg/ml. In some embodiments, the composition comprises the recombinant AAV vector particles described herein at a concentration from about 1e¹² vg/ml to about 1e¹⁵ vg/ml. For example, the composition comprises the recombinant AAV vector particles described herein at a concentration from about 3e⁹ vg/ml to about 3e¹³ vg/ml, from about 2.5e¹⁰ vg/ml to about 1e⁴ vg/ml, from about 3e¹⁰ vg/ml to about 1e¹³ vg/ml, or from 1e¹¹ vg/ml to about 5e¹² vg/ml.

[0476] In some embodiments, the composition comprises the recombinant AAV vector particles described herein at a concentration of about 1e¹¹ vg/ml, or about 1.5e¹² vg/ml, or about 2e¹¹ vg/ml, or about 2.5e¹² vg/ml, or about 3e¹² vg/ml, or about 3.5e¹² vg/ml, or about 4e¹² vg/ml, or about 4.5e¹² vg/ml, or about 5e¹² vg/ml, or about 5.5e¹² vg/ml, or about 6e¹² vg/ml, or about 6.5e¹² vg/ml, or about 7e¹² vg/ml, or about 7.5e¹² vg/ml, or about 8e¹² vg/ml, or about 8.5e¹² vg/ml, or about 9e¹² vg/ml, or about 9.5e¹³ vg/ml, or about 1e¹³ vg/ml, or about 1.5e¹³ vg/ml, or about 2e¹³ vg/ml, or about 2.5e¹³ vg/ml, or about 3e¹³ vg/ml, or about 3.5e¹³ vg/ml, or about 4e¹³ vg/ml, or about 4.5e¹³ vg/ml, or about 5e¹³ vg/ml, or about 5.5e¹³ vg/ml, or about 6e¹³ vg/ml, or about 6.5e¹³ vg/ml, or about 7e¹³ vg/ml, or about 7.5e¹³ vg/ml, or about 8e¹³ vg/ml, or about 8.5e¹³ vg/ml, or about 9e¹³ vg/ml, or about 9.5e¹³ vg/ml, or about 1e¹4 vg/ml.

[0477] The pharmaceutical composition comprises the population of purified recombinant adeno-associated virus (rAAV) described herein. The pharmaceutical composition comprising the rAAV, comprises a buffer of pH about 6.5 to about 8.0. In some embodiments, the pH is about 6.5 to about 7.5. For example, the pH is from about 6.5, about 6.6, about 6.7, about 6.8, about 6.9, about 7.0, about 7.1, about 7.2, about 7.3, about 7.4 or about 7.5. In some preferred embodiments, the pH is less than about 7.5. For example, the pH is less than about 7.4, less than about 7.3, less than about 7.2, less than about 7.1, less than about 7.0, less than about 6.9, less than about 6.8, less than about 6.7, or less than about 6.6. In some embodiments, the pharmaceutical composition comprises one or, more excipients, comprising one or, more multivalent ions and/or, salts thereof. In some embodiments, the multivalent ions can be selected or, optionally selected from the group consisting of citrate, sulfate, magnesium and phosphate. In some embodiments, the pharmaceutical composition comprises one or, more excipients, comprising one or, more ions selected or, optionally selected from the group consisting of, sodium, potassium, chloride, ammonium, carbonate, nitrate, chlorate, chlorite, and calcium. In some embodiments, the pharmaceutical composition comprising the rAAV, further comprises a non-ionic surfactant. In some embodiments, the non-ionic surfactant is selected from the group consisting of polyoxyethylene fatty alcohol ethers, polyoxyethylene alkyl phenyl ethers, polyoxyethylene-polyoxypropylene block copolymers, alkylglucosides, alkyl phenol ethoxylates, preferably polysorbates, polyoxyethylene alkyl phenyl ethers, and any combinations thereof. In some embodiments, non-ionic surfactant is selected from the group consisting of TWEEN 60 nonionic detergent, PPG-PEG-PPG Pluronic 10R5, Polyoxyethylene (18) tridecyl ether, Polyoxyethylene (12) tridecyl ether, MERPOL SH surfactant, MERPOL OJ surfactant, MERPOL HCS surfactant, Poloxamer P188, Poloxamer P407, Poloxamer P338 IGEPAL CO-720, IGEPAL CO-630, IGEPAL CA-720, Brij S20, BrijS10, Brij 010, Brij C10, BRIJ 020, ECOSURF EH-9,ECOSURF EH-14, TERGITOL 15-S-7, PF-68, ECOSURF SA-15, TERGITOL15-S-9, TERGITOL 15-S-12, TERGITOL L-64, TERGITOLNP-7, TERGITOL NP-8, TERGITOL NP-9, TERGITOL NP-9.5, TERGITOL NP-10, TERGITOL NP-11, TERGITOL NP-12, TERGITOLNP-13, polysorbate 20, and any combinations thereof. In some embodiments, the pharmaceutical composition further comprises polyol, or, sugar, or similar. See, e.g., International Patent No. WO2022/159679, which is incorporated herein by reference in its entirety.

[0478] In some embodiments, the composition comprises a buffer. It is noted that any physiological buffer can be used. Non-limiting examples of buffers include, but are not limited to, PBS, Tris.HCl, phosphate, citric acid, histidine, tromethamine, succinic acid, malic acid, α-ketoglutaric acid, carbonate (bicarbonate-carbonic acid buffer), and protein buffers. In some embodiments, the buffer is PBS. In some embodiments, the buffer comprises Tris. In some embodiments, buffer is Tris.HCl. In some embodiments, the buffer is histidine buffer.

[0479] Generally, the buffer has a salt concentration of from about 50 mM to about 750 mM. For example, the buffer has a salt concentration from about 75 mM to about 700 mM, from about 100 mM to about 650 mM, from about 120 mM to about 600 mM, or from about 140 mM to about 550 mM. In some embodiments, the buffer has a salt concentration from about 150 mM to about 400 mM. In some embodiments, the buffer has a salt concentration of about 150 mM, about 175 mM, about 200 mM, about 225 mM, about 250 mM, about 275 mM, about 300 mM, about 325 mM, about 350 mM, about 375 mM, about 400 mM, about 425 mM, about 450 mM, or about 475 mM. In some preferred embodiments, the buffer has a salt concentration of about 150 mM, about 200 mM or about 365 mM.

[0480] In some embodiments, the ionic strength of the composition is at least about 100 mM. For example, the ionic strength of the composition is from about 125 mM to about 750 mM, or from about 150 mM to about 500 mM, or from about 175 mM to about 700 mM, from about 200 mM to about 600 mM, or from about 225 mM to about 550 mM, or from about 250 mM to about 500 mM, or from about 275 mM to about 450 mM, or from about 300 mM to about 400 mM. In some embodiments, the ionic strength of the composition is at least about 125 mM, at least about 150 mM, at least about 175 mM, at least about 200 mM, at least about 225 mM, at least about 250 mM, at least about 275 mM, at least about 300 mM, at least about 325 mM, at least about 350 mM, at least about 375 mM, at least about 400 mM, at least about 425 mM, at least about 450 mM, at least about 475 mM or at least about 500 mM. In some embodiments, the ionic strength of the composition is less than 100 mM, for example about 95 mM, about 90 mM, about 85 mM, about 80 mM, about 75 mM, about 70 mM, about 65 mM, about 60 mM, about 55 mM, about 50 mM, or, even less.

[0481] The osmolarity of the composition is maintained at near isotonic levels. For example, the osmolarity of the composition can be from about 100 mOsm to about 600 mOsm, such as from about 125 mOsm to about 500 mOsm, or, from about 130 mOsm to about 350 mOsm, or, from about 140 mOsm to about 400 mOsm, or, from about 140 mOsm to about 350 mOsm, or from about 200 mOsm to about 400 mOsm, or from about 500 mOsm to about 600 mOsm, or from about 200 mOsm to about 600 mOsm, or from about 300 mOsm to about 600 mOsm, or from about 200 mOsm to about 500 mOsm, or from about 300 mOsm to about 400 mOsm, or from about 150 mOsm to about 350 mOsm, or from about 175 mOsm to about 300 mOsm, or from about 300 mOsm to about 375 mOsm, or from about 200 mOsm to about 350 mOsm, or from about 225 mOsm to about 325 mOs, or from about 525 mOsm to about 590 mOsm. In some embodiments, the composition comprises an isotonic solution.

[0482] Generally, the composition has a pH of about 6.5 to about 8.0. For example, the composition has a pH of about 6.5 to about 7.5. In some embodiments, the composition has a pH of from about 7 to about 8. For example, the composition has a pH of from about 7.3 to about 7.9. In some other non-limiting example, the composition has a pH of from about 7.4 to about 7.8 or from about 7.4 to about 7.7. In some embodiments, the composition has a pH of from about 7.3 to about 7.6, e.g., from about 7.3 to about 7.55. In some preferred embodiments, the composition has a pH less than about 7.5. For example, the composition has a pH about 7.4 or lower, about 7.3 or lower, about 7.2 or lower, about 7.1 or lower, about 7.0 or lower, about 6.9 or lower, about 6.8 or lower, about 6.7 or lower, about 6.6 or lower, or about 6.5 or lower.

[0483] The composition can comprise one or more ions and/or salts thereof. Exemplary ions include, but are not limited to sodium, potassium, chloride, magnesium ammonium, carbonate, nitrate, chlorate, chlorite, and calcium. The ions can be provided as a salt, such as a halide (F, Cl, Br, I) salt of sodium, potassium, magnesium, and/or calcium, non-limiting examples of which include NaCl, KCl, MgCl₂, CaCl₂, and combinations thereof. Additional exemplary salts that can be used include, but are not limited to, carboxylic acid salts, such as acetates, propionates, pyrrol idonecarboxylates (or pidolates) or sorbates; poly hydroxylated carboxylic acid salts, such as gluconates, heptagluconates, ketogluconates, lactate gluconates, ascorbates or pantothenates; mono- or polycarboxyl hydroxy acid salts, such as citrates or lactates; amino acid salts, such as aspartates or glutamates; and fulvate salts. The salts are individually included at a concentration of from about 500 μM to about 500 mM.

[0484] In some embodiments, the composition comprises one or more multivalent ions and/or salts thereof. Exemplary multivalent ions include, but are not limited to, calcium, citrate, sulfate, magnesium, and phosphate. Multivalent ions and/or salts thereof can be individually included in the composition at a concentration of from about 500 μM to about 500 mM, for example, at a concentration of about 500 μM, about 750 μM, about 1 mM, about 1.3 mM, about 1.5 mM, about 1.7 mM, about 2.3 mM, about 2.5 mM, about 2.7 mM, about 3.3 mM, about 3.5 mM, about 3.7 mM, about 4.3 mM, about 4.5 mM, about 4.7 mM, about 5 mM, about 10 mM, about 25 mM, about 50 mM, about 75 mM, about 80 mM, about 85 mM, about 90 mM, about 95 mM, about 100 mM, about 125 mM, about 150 mM, about 175 mM, about 200 mM, about 225 mM, about 250 mM, about 275 mM, about 300 mM, about 325 mM, about 350 mM, about 375 mM, about 400 mM, about 425 mM, about 450 mM, about 475 mM, or about 500 mM. Non limiting examples of salts are NaCl, KCl, CaCl₂, CaSO₄, MgSO₄, Na₃PO₄, CaCO₃, NaNO₃, Al₂(SO4)₃.

[0485] In some embodiments, the composition comprises NaCl. When present, NaCl can be at a concentration from about 100 mM to about 500 mM, or from about 125 mM to about 450 mM, or from about 100 mM to about 200 mM, or from about 150 mM to about 200 mM. For example, the composition can comprise NaCl at a concentration from about 150 mM to about 425 mM, from about 175 mM to about 400 mM, or from about 175 mM to about 375 mM, or from about 200 mM to about 375 mM.

[0486] In some embodiments, the composition comprises KCl. When present, KCl can be at a concentration from about 1 mM to about 10 mM. For example, the composition can comprise KCl at a concentration from about 1.5 mM to about 7.5 mM.

[0487] In some embodiments, the composition comprises CaCl₂. When present, CaCl₂ can be at a concentration from about 0.1 mM to about 2 mM. For example, the composition can comprise CaCl₂ at a concentration from about 0.5 mM to about 1.5 mM. In some embodiments, the composition comprises CaCl₂ at a concentration from about 0.75 mM to about 1.25 mM.

[0488] In some embodiments, the composition comprises MgCl₂. When present, MgCl₂ can be at a concentration from about 0.1 mM to about 1.5 mM. For example, the composition can comprise MgCl₂ at a concentration from about 0.25 mM to about 1 mM or from about 0.25 mM to about 0.75 mM.

[0489] In some embodiments, the composition comprises MgSO₄. When present, MgSO₄ can be at a concentration from about 5 mM to about 150 mM. For example, the composition can comprise MgSO₄ at a concentration from about 10 mM to about 120 mM, or from about 10 mM to about 50 mM, or from about 15 mM to about 45 mM, or about 75 mM to about 125 mM, or from about 80 mM to about 100 mM, or from about 85 mM to about 95 mM, or from about 15 mM to about 100 mM.

[0490] In some embodiments, the composition comprises phosphate, e.g., mono basic or dibasic phosphate or a salt thereof. When present, the phosphate, e.g., mono basic or dibasic phosphate or a salt thereof can be at a concentration from about 5 mM to about 30 mM. For example, the composition can comprise phosphate, e.g., mono basic or dibasic phosphate or a salt thereof at a concentration from about 7.5 mM to about 25 mM. In some embodiments, the composition comprises phosphate, e.g., mono basic or dibasic phosphate or a salt thereof at a concentration from about 10 mM to about 20 mM.

[0491] In some embodiments, the composition comprises a mono basic phosphate or a salt thereof at a concentration from about 0.25 mM to about 3 mM. For example, the composition comprises a mono basic phosphate or a salt thereof at a concentration from about 0.5 mM to about 2.75 mM, or from about 0.75 mM to about 2.5 mM or from about 1 mM to about 2.25 mM. In some embodiments, the mono basic phosphate or salt thereof is potassium phosphate monobasic.

[0492] In some embodiments, the composition comprises a dibasic phosphate or a salt thereof at a concentration from about 5 mM to about 15 mM. For example, the composition comprises a dibasic phosphate or a salt thereof at a concentration from about 7.5 mM to about 12.5 mM or from about 8 mM to about 10 mM. In some embodiments, the dibasic phosphate or a salt thereof is sodium phosphate dibasic. In some embodiments, the composition is substantially free of dibasic phosphate, e.g., sodium phosphate dibasic.

[0493] In some embodiments, the composition comprises Tris (e.g., Tris.HCl) or a salt thereof at a concentration from about 1 mM to about 50 mM. For example, the composition comprises Tris (e.g., Tris.HCl) or a salt thereof at a concentration of from about 5 mM to about 40 mM, or from about 7.5 mM to about 35 mM, or from about 10 mM to about 30 mM or from about 15 mM to about 25 mM.

[0494] In some embodiments, the composition comprises histidine or a salt thereof at a concentration from about 1 mM to about 50 mM. For example, the composition comprises histidine or a salt thereof at a concentration of from about 5 mM to about 40 mM, or from about 7.5 mM to about 35 mM, or from about 10 mM to about 30 mM or from about 15 mM to about 25 mM.

[0495] The composition can also comprise a bulking agent. Exemplary bulking agents include, but are not limited to sugars, polyols and (PVP K24). Exemplary polyols include, but are not limited to, polyhydroxy hydrocarbons, monosaccharides, disaccharides, and trisaccharides. Some exemplary polyols include but are not limited to, sorbitol, mannitol, glycerol, propylene glycol, polyethylene glycol, dulcitol, sucrose, lactose, maltose, trehalose and dextran. In some embodiments, polyol is sorbitol, sucrose or mannitol. In some embodiments, the bulking agent is sorbitol. In some embodiments, the bulking agent is sucrose. In some embodiments, the bulking agent is mannitol. In some embodiments, the bulking agent is trehalose, e.g., trehalose dehydrate. In some embodiments, the bulking agent is a dextran, e.g., Dextran T40 and/or Dextran T10.

[0496] When present, the bulking agent can be present at a concentration of from about 0.5% (w/v) to about 10% (w/v). For example, the composition can comprise a bulking agent, e.g., a polyol or providone (PVP K24) at a concentration from about from about 1% (w/v) to about 7.5% (w/v), e.g., from about 1% (w/v) to about 4% (w/v) or from about 4% (w/v) to about 6% (w/v).

[0497] In some embodiments, the composition comprises glycerol, sorbitol, sucrose, or mannitol at a concentration from about 1% (w/v) to about 10% (w/v). In some embodiments, the composition comprises glycerol, sorbitol, sucrose, or mannitol at a concentration from about 1% (w/v) to about 10% (w/v). In some embodiments, the composition comprises sorbitol at concentration from about 3% (w/v) to about 6% (w/v). In some embodiments, the composition comprises sorbitol at concentration of about 1% (w/v), about 2% (w/v), about 3% (w/v), about 4% (w/v), about 5% (w/v), about 6% (w/v), about 7% (w/v), about 8% (w/v), about 9% (w/v), or about 10% (w/v). In some embodiments, the composition comprises sucrose at concentration from about 3% (w/v) to about 6% (w/v). In some embodiments, the composition comprises sucrose at concentration of about 1% (w/v), about 2% (w/v), about 3% (w/v), about 4% (w/v), about 5% (w/v), about 6% (w/v), about 7% (w/v), about 8% (w/v), about 9% (w/v), or about 10% (w/v). In some embodiments, the composition comprises mannitol at concentration from about 3% (w/v) to about 6% (w/v). In some embodiments, the composition comprises mannitol at concentration of about 1% (w/v), about 2% (w/v), about 3% (w/v), about 4% (w/v), about 5% (w/v), about 6% (w/v), about 7% (w/v), about 8% (w/v), about 9% (w/v), or about 10% (w/v).

[0498] The composition can also comprise a non-ionic surfactant. The non-ionic surfactant can be selected from the group consisting of polyoxyethylene fatty alcohol ethers, polyoxyethylene alkyl phenyl ethers, polyoxyethylene-polyoxypropylene block copolymers, alkylglucosides, alkyl phenol ethoxylates, preferably polysorbates, polyoxyethylene alkyl phenyl ethers, and any combinations thereof. Non-limiting examples of suitable non-ionic surfactants include polyoxyethylene (12) isooctylphenyl ether (e.g., IGEPAL® CA-270 polyoxyethylene (12) isooctylphenyl ether), polyoxyethylenesorbitan monooleate (e.g., TWEEN® 80 polyoxyethylenesorbitan monooleate), polyethylene glycol octadecyl ether (e.g., Brij® S20 polyethylene glycol octadecyl ether), seed oil surfactant (e.g., Ecosurf™ SA-15 seed oil surfactant), poloxamer 188 (a copolymer of polyoxyethylene and polyoxypropylene), nonylphenol ethoxylate (e.g., Tergitol™ NP-10 nonylphenol ethoxylate), and combinations thereof. In some embodiments, the non-ionic surfactant is selected from the group consisting of TWEEN 60 nonionic detergent, PPG-PEG-PPG Pluronic 10R5, Pluronic F-68 (PF 68), Polyoxyethylene (18) tridecyl ether, Polyoxyethylene (12) tridecyl ether, MERPOL SH surfactant, MERPOL OJ surfactant, MERPOL HCS surfactant, Poloxamer P188, Poloxamer P407, Poloxamer P 338, IGEPAL CO-720, IGEPAL CO-630, IGEPAL CA-720, Brij S20, BrijS10, Brij 010, Brij C10, BRIJ 020, ECOSURF EH-9,ECOSURF EH-14, TERGITOL 15-S-7, ECOSURF SA-15, TERGITOL15-S-9, TERGITOL 15-S-12, TERGITOL L-64, TERGITOLNP-7, TERGITOL NP-8, TERGITOL NP-9, TERGITOL NP-9.5, TERGITOL NP-10, TERGITOL NP-11, TERGITOL NP-12, TERGITOLNP-13, polysorbate 20, and any combinations thereof. In some embodiments, the non-ionic surfactant is Poloxamer P 188, Poloxamer P407, Pluronic F-68, Ecosurf SA-15, Brij S20, Tergitol NP-10, IGEPAL CA 720 or Tween 80. In some embodiments, the composition is substantially free of a non-ionic surfactant. In some embodiments, the non-ionic surfactant is not a polysorbate, e.g., Tween 80 (also referred to as polysorbate 80 or PS80).

[0499] When present, the non-ionic surfactant can be present at a concentration from about 0.0001% (w/v) to about 0.01% (w/v). For example, the composition can comprise a non-ionic surfactant at a concentration from about 0.0005% (w/v) to about 0.0015% (w/v). In some embodiments, the composition can comprise a non-ionic surfactant at a concentration of about 0.0001% (w/v), about 0.0002% (w/v), about 0.0003% (w/v), about 0.0004% (w/v), about 0.0005% (w/v), about 0.0006% (w/v), about 0.0007% (w/v), about 0.0008% (w/v), about 0.0009% (w/v), about 0.001% (w/v), about 0.002% (w/v), about 0.003% (w/v), about 0.004% (w/v), about 0.005% (w/v), about 0.006% (w/v), about 0.007% (w/v), about 0.008% (w/v), about 0.009% (w/v), or about 0.01%. (w/v). In some preferred embodiments, the composition comprises a non-ionic surfactant at a concentration of about 0.0005% (w/v) or about 0.001% (w/v).

[0500] In some embodiments, the composition comprises, in addition to the rAAV, a buffer (e.g., PBS, Tris.HCl, phosphate, citric acid, histidine, tromethamine, succinic acid, malic acid, α-ketoglutaric acid, carbonate buffer), a bulking agent (e.g., a polyol such as sorbitol, mannitol, glycerol, propylene glycol, polyethylene glycol, dulcitol, sucrose, lactose, maltose, trehalose and dextran) and a non-ionic surfactant (e.g., Poloxamer P 188, Poloxamer P407, Pluronic F-68, Ecosurf SA-15, Brij S20, Tergitol NP-10, IGEPAL CA 720 or Tween 80).

[0501] In some embodiments, the composition comprises, in addition to the rAAV, a buffer (e.g., PBS, Tris.HCl, phosphate, citric acid, histidine, tromethamine, succinic acid, malic acid, α-ketoglutaric acid, carbonate buffer), a bulking agent (e.g., a polyol such as sorbitol, mannitol, glycerol, propylene glycol, polyethylene glycol, dulcitol, sucrose, lactose, maltose, trehalose and dextran), a non-ionic surfactant (e.g., Poloxamer P 188, Poloxamer P407, Pluronic F-68, Ecosurf SA-15, Brij S20, Tergitol NP-10, IGEPAL CA 720 or Tween 80), and a multivalent ion (e.g., a multivalent ion selected from the group consisting of calcium, citrate, sulfate, and magnesium).

[0502] In some embodiments, the composition comprises, in addition to the rAAV, a buffer (e.g., PBS, Tris.HCl, phosphate, citric acid, histidine, tromethamine, succinic acid, malic acid, α-ketoglutaric acid, carbonate buffer), a bulking agent (e.g., a polyol such as sorbitol, mannitol, glycerol, propylene glycol, polyethylene glycol, dulcitol, sucrose, lactose, maltose, trehalose and dextran), and a multivalent ion (e.g., a multivalent ion selected from the group consisting of calcium, citrate, sulfate, and magnesium).

[0503] It is noted that any one of the specific buffers or group of buffers listed in the description of the compositions can be used with any one of the specific bulking agents or group of bulking agents listed in the description of the compositions and with any of the specific non-ionic surfactants or group of surfactants listed in the description of the compositions and with any of the specific multivalent ions and multivalent ion group listed in the description of the compositions. Similarly, any one of the specific bulking agents or group of bulking agents listed in the description of the compositions can be used with any one of the specific buffers or group of buffers listed in the description of the compositions and with any of the specific non-ionic surfactants or group of surfactants listed in the description of the compositions and with any of the specific multivalent ions and multivalent ion group listed in the description of the compositions. Likewise, any of the specific non-ionic surfactants or group of surfactants listed in the description of the compositions can be used with any one of the specific buffers or group of buffers listed in the description of the compositions and with any one of the specific bulking agents or group of bulking agents listed in the description of the compositions and with any of the specific multivalent ions and multivalent ion group listed in the description of the compositions. As well, any of the specific multivalent ions and multivalent ion group listed in the description of the compositions can be used with any one of the specific buffers or group of buffers listed in the description of the compositions and with any one of the specific bulking agents or group of bulking agents listed in the description of the compositions and with any of the specific non-ionic surfactants or group of surfactants listed in the description of the compositions. In other words, all individual specific combinations of buffers, buffer group, bulking agents, bulking agent groups, non-ionic surfactants, non-ionic surfactant groups, multivalent ions and multivalent ion groups listed in the description of the compositions are specifically contemplated and claimed.

### Exemplary Compositions

[0504] In some embodiments, the composition, e.g., the pharmaceutical composition comprises, in addition to the rAAV, about 10 mM Phosphate pH 7.4, about 200 mM NaCl, about 5 mM KCl, about 1% (w/v) mannitol, and about 0.0005% (w/v) IGEPAL CA 720.

[0505] In some embodiments, the composition, e.g., the pharmaceutical composition comprises, in addition to the rAAV, about 20 mM Phosphate pH 7.4, about 300 mM NaCl, about 3 mM KCl, about 3% (w/v) mannitol, and about 0.001% (w/v) Brij 520.

[0506] In some embodiments, the composition, e.g., the pharmaceutical composition comprises, in addition to the rAAV, about 20 mM Phosphate pH 7.4, about 300 mM NaCl, about 3 mM KCl, about 3% (w/v) sorbitol, and about 0.001% (w/v) Ecosurf SA-15.

[0507] In some embodiments, the composition, e.g., the pharmaceutical composition comprises, in addition to the rAAV, about 10 mM Phosphate pH 7.4, about 350 mM NaCl, about 2.7 mM KCl, about 5% (w/v) sorbitol, and about 0.001% (w/v) poloxamer 188.

[0508] In some embodiments, the composition, e.g., the pharmaceutical composition comprises, in addition to the rAAV, about 10 mM Phosphate pH 6.95-7.2, about 137 mM NaCl, about 2.7 mM KCl, about 0.9 mM CaCl₂, about 0.5 mM MgCl₂, and about 0.001% (w/v) Pluronic F-68.

[0509] In some embodiments, the composition, e.g., the pharmaceutical composition comprises, in addition to the rAAV, about 10 mM Phosphate pH 7.3, about 180 mM NaCl, about 2.7 mM KCl, about 5% (w/v) sorbitol, and about 0.001% (w/v) Poloxamer 188.

[0510] In some embodiments, the composition, e.g., the pharmaceutical composition comprises, in addition to the rAAV, about 15 mM Phosphate pH 7.4, about 375 mM NaCl, about 3.5 mM KCl, about 5% (w/v) sorbitol, and about 0.0005% (w/v) Tergitol NP-10.

[0511] In some embodiments, the c composition, e.g., the pharmaceutical composition comprises, in addition to the rAAV, about 15 mM Phosphate pH 7.4, about 375 mM NaCl, about 3.5 mM KCl, about 3% (w/v) glycerol, and about 0.0005% (w/v) Tween 80.

[0512] In some embodiments, the composition, e.g., the pharmaceutical composition comprises, in addition to the rAAV, about 10 mM Phosphate pH 7.6, about 137 mM NaCl, about 2.7 mM KCl, about 5% (w/v) sorbitol, and about 0.01% Pluronic F-68.

[0513] In some embodiments, the composition, e.g., the pharmaceutical composition comprises, in addition to the rAAV, about 10 mM Phosphate pH 7.4, about 137 mM NaCl, about 2.7 mM KCl, about 5% (w/v) sorbitol, about 0.01% Pluronic F-68, and about 20 mM MgSO₄.

[0514] In some embodiments, the composition, e.g., the pharmaceutical composition comprises, in addition to the rAAV, about 10 mM Phosphate pH 7.6, about 137 mM NaCl, about 2.7 mM KCl, about 5% (w/v) mannitol, and about 0.01% Pluronic F-68.

[0515] In some embodiments, the composition, e.g., the pharmaceutical composition comprises, in addition to the rAAV, about 10 mM Phosphate pH 7.3, about 137 mM NaCl, about 2.7 mM KCl, about 5% (w/v) mannitol, about 0.01% Pluronic F-68, and about 20 mM MgSO₄.

[0516] In some embodiments, the composition, e.g., the pharmaceutical composition comprises, in addition to the rAAV, about 10 mM Phosphate pH 7.4, about 137 mM NaCl, about 2.7 mM KCl, about 5% (w/v) sorbitol, and about 20 mM MgSO₄.

[0517] In some embodiments, the composition, e.g., the pharmaceutical composition comprises, in addition to the rAAV, about 10 mM Phosphate pH 7.4, about 137 mM NaCl, about 2.7 mM KCl, about 5% (w/v) mannitol, and about 20 mM MgSO₄.

[0518] In some embodiments, the composition, e.g., the pharmaceutical composition comprises recombinant AAV vector (rAAV), in 10 mM Phosphate pH 7.4, 200 mM NaCl, 5 mM KCl, 1% (w/v) mannitol, 0.0005% (w/v) IGEPAL CA 720 to a fill volume of 5 ml. In some embodiments, the fill volume is 1 ml, 2 ml, 3 ml, 4 ml, 5 ml, 6 ml, 7 ml, 8 ml, 9 ml, or, 10 ml.

[0519] In some embodiments, the composition, e.g., the pharmaceutical composition comprises recombinant AAV vector (rAAV), in 20 mM Phosphate pH 7.4, 300 mM NaCl, 3 mM KCl, 3% (w/v) mannitol, 0.001% (w/v) Brij S20 to a fill volume of 5 ml. In some embodiments, the fill volume is 1 ml, 2 ml, 3 ml, 4 ml, 5 ml, 6 ml, 7 ml, 8 ml, 9 ml, or, 10 ml.

[0520] In some embodiments, the composition, e.g., the pharmaceutical composition comprises recombinant AAV vector (rAAV), in 20 mM Phosphate pH 7.4, 300 mM NaCl, 3 mM KCl, 3% (w/v) sorbitol, 0.001% (w/v) Ecosurf SA-15 to a fill volume of 5 ml. In some embodiments, the fill volume is 1 ml, 2 ml, 3 ml, 4 ml, 5 ml, 6 ml, 7 ml, 8 ml, 9 ml, or, 10 ml.

[0521] In some embodiments, the composition, e.g., the pharmaceutical composition comprises recombinant AAV vector (rAAV), in 10 mM Phosphate pH 7.4, 350 mM NaCl, 2.7 mM KCl, 5% (w/v) sorbitol, 0.001% (w/v) poloxamer 188 to a fill volume of 5 ml. In some embodiments, the fill volume is 1 ml, 2 ml, 3 ml, 4 ml, 5 ml, 6 ml, 7 ml, 8 ml, 9 ml, or, 10 ml.

[0522] In some embodiments, the composition, e.g., the pharmaceutical composition comprises recombinant AAV vector (rAAV), in 15 mM Phosphate pH 7.4, 375 mM NaCl, 3.5 mM KCl, 5% (w/v) sorbitol, 0.0005% (w/v) Tergitol NP-10 to a fill volume of 5 ml. In some embodiments, the fill volume is 1 ml, 2 ml, 3 ml, 4 ml, 5 ml, 6 ml, 7 ml, 8 ml, 9 ml, or, 10 ml.

[0523] In some embodiments, the composition, e.g., the pharmaceutical composition comprises recombinant AAV vector (rAAV), in 15 mM Phosphate pH 7.4, 375 mM NaCl, 3.5 mM KCl, 3% (w/v) glycerol, 0.0005% (w/v) Tween 80 to a fill volume of 5 ml. In some embodiments, the fill volume is 1 ml, 2 ml, 3 ml, 4 ml, 5 ml, 6 ml, 7 ml, 8 ml, 9 ml, or, 10 ml.

[0524] Additional exemplary compositions/compositions comprising rAAV are described in PCT/US2022/0137279, the content of which is incorporated herein by reference in its entirety.

[0525] All compositions stored between −60° C. to about −80° C.

[0526] The rAAV vectors as disclosed herein for use in the methods of administration as disclosed herein may be used in combination with one or more other therapeutic, prophylactic, research or diagnostic agents. By “in combination with,” it is not intended to imply that the agents must be administered at the same time and/or formulated for delivery together, although these methods of delivery are within the scope of the present invention. Compositions can be administered concurrently with, prior to, or subsequent to, one or more other desired therapeutics or medical procedures. In some embodiments, the delivery of one treatment (e.g., gene therapy vectors) is still occurring when the delivery of the second (e.g., one or more therapeutic) begins, so that there is overlap in terms of administration. This is sometimes referred to herein as “simultaneous” or “concurrent delivery.” In other embodiments, the delivery of one treatment ends before the delivery of the other treatment begins. In some embodiments of either case, the treatment is more effective because of combined administration. For example, the second treatment is more effective, e.g., an equivalent effect is seen with less of the second treatment, or the second treatment reduces symptoms to a greater extent, than would be seen if the second treatment were administered in the absence of the first treatment, or the analogous situation is seen with the first treatment. In some embodiments, delivery is such that the reduction in a symptom, or other parameter related to the disorder is greater than what would be observed with one treatment delivered in the absence of the other. The effect of the two treatments can be partially additive, wholly additive, or greater than additive. The delivery can be such that an effect of the first treatment delivered is still detectable when the second is delivered. The composition described herein and the at least one additional therapy can be administered simultaneously, in the same or in separate compositions, or sequentially. For sequential administration, the gene therapy vectors described herein can be administered first, and the one or more therapeutic can be administered second, or the order of administration can be reversed. The gene therapy vectors and the one or more therapeutic can be administered during periods of active disorder, or during a period of remission or less active disease. The gene therapy vectors can be administered before another treatment, concurrently with the treatment, post-treatment, or during remission of the disorder.

[0527] When administered in combination, the rAAV vectors as disclosed herein for use in the methods of administration as disclosed herein and the one or more therapeutic (e.g., second or third therapeutic), or all, can be administered in an amount or dose that is higher, lower or the same as the amount or dosage of each used individually, e.g., as a monotherapy. In certain embodiments, the administered amount or dosage of a rAAV vector as disclosed herein for use in the methods of administration as disclosed herein and the one or more therapeutic (e.g., second or third agent), or all, is lower (e.g., at least 20%, at least 30%, at least 40%, or at least 50%) than the amount or dosage of each used individually. In other embodiments, the amount or dosage of the rAAV vector as disclosed herein for use in the methods of administration as disclosed herein and the one or more therapeutic (e.g., second or third agent), or all, that results in a desired effect (e.g., treatment of a cardiovascular disease or heart disease) is lower (e.g., at least 20%, at least 30%, at least 40%, or at least 50% lower) than the amount or dosage of each individually required to achieve the same therapeutic effect.

[0528] In some embodiments, the methods of administration of a rAAV vector as disclosed herein can deliver a rAVV vector disclosed herein alone, or in combination with an additional agent, for example, an immune modulator as disclosed herein.

[0529] In some embodiments, the AAV vectors expressing GAA as disclosed herein are not administered concurrently with, or in combination with ERT. In alternative embodiments, the AAV vectors expressing GAA as disclosed herein are administered in combination with ERT for a maximum period of 24 weeks or shorter than 24 weeks after administration of the AAV expressing ERT. In some embodiments, the AAV vectors expressing GAA as disclosed herein are administered in combination with an immune modulator for an initial period and, optionally a tapering period after administration of the AAV expressing ERT.

### VI. Definitions

[0530] The following terms are used in the description herein and the appended claims:

[0531] The terms “a,” “an,” “the” and similar references used in the context of describing the present invention (especially in the context of the following claims) are to be construed to cover both the singular and the plural, unless otherwise indicated herein or clearly contradicted by context. Further, ordinal indicators—such as “first,” “second,” “third,” etc.—for identified elements are used to distinguish between the elements, and do not indicate or imply a required or limited number of such elements, and do not indicate a particular position or order of such elements unless otherwise specifically stated. All methods described herein can be performed in any suitable order unless otherwise indicated herein or otherwise clearly contradicted by context. The use of any and all examples, or exemplary language (e.g., “such as”) provided herein is intended merely to better illuminate the present invention and does not pose a limitation on the scope of the invention otherwise claimed. No language in the present specification should be construed as indicating any non-claimed element essential to the practice of the invention.

[0532] Furthermore, the term “about,” as used herein when referring to a measurable value such as an amount of the length of a polynucleotide or polypeptide sequence, dose, time, temperature, and the like, is meant to encompass variations of ±20%, ±10%, ±5%, ±1%, ±0.5%, or even ±0.1% of the specified amount.

[0533] Also as used herein, “and/or” refers to and encompasses any and all possible combinations of one or more of the associated listed items, as well as the lack of combinations when interpreted in the alternative (“or”).

[0534] As used herein, the transitional phrase “consisting essentially of” means that the scope of a claim is to be interpreted to encompass the specified materials or steps recited in the claim, “and those that do not materially affect the basic and novel characteristic(s)” of the claimed invention. See, In re Herz, 537 F.2d 549, 551-52, 190 USPQ 461,463 (CCPA 1976) (emphasis in the original); see also MPEP § 2111.03. Thus, the term “consisting essentially of” when used in a claim of this invention is not intended to be interpreted to be equivalent to “comprising.” Unless the context indicates otherwise, it is specifically intended that the various features of the invention described herein can be used in any combination.

[0535] Moreover, the present invention also contemplates that in some embodiments of the invention, any feature or combination of features set forth herein can be excluded or omitted.

[0536] To illustrate further, if, for example, the specification indicates that a particular amino acid can be selected from A, G, I, Land/or V, this language also indicates that the amino acid can be selected from any subset of these amino acid(s) for example A, G, I or L; A, G, I or V; A or G; only L; etc. as if each such subcombination is expressly set forth herein. Moreover, such language also indicates that one or more of the specified amino acids can be disclaimed (e.g., by negative proviso). For example, in particular embodiments the amino acid is not A, G or I; is not A; is not G or V; etc. as if each such possible disclaimer is expressly set forth herein.

[0537] The term “parvovirus” as used herein encompasses the family Parvoviridae, including autonomously replicating parvoviruses and dependoviruses. The autonomous parvoviruses include members of the genera Parvovirus, Erythrovirus, Densovirus, Iteravirus, and Contravirus. Exemplary autonomous parvoviruses include, but are not limited to, minute virus of mouse, bovine parvovirus, canine parvovirus, chicken parvovirus, feline panleukopenia virus, feline parvovirus, goose parvovirus, H1 parvovirus, Muscovy duck parvovirus, B19 virus, and any other autonomous parvovirus now known or later discovered. Other autonomous parvoviruses are known to those skilled in the art. See, e.g., BERNARD N. FIELDS et al., VIROLOGY, volume 2, chapter 69 (4th ed., Lippincott-Raven Publishers).

[0538] As used herein, the term “adeno-associated virus” (AAV), includes but is not limited to, AAV type 1, AAV type 2, AAV type 3 (including types 3A and 3B), AAV type 4, AAV type 5, AAV type 6, AAV type 7, AAV type 8, AAV type 9, AAV type 10, AAV type 11, avian AAV, bovine AAV, canine AAV, equine AAV, ovine AAV, and any other AAV now known or later discovered. See, e.g., BERNARD N. FIELDS et al., VIROLOGY, volume 2, chapter 69 (4th ed., Lippincott-Raven Publishers). A number of relatively new AAV serotypes and clades have been identified (see, e.g., Gao et al., (2004) J. Virology 78:6381-6388; Moris et al., (2004) Virology 33-:375-383); and also Table 1 as disclosed in U.S. Provisional Application 62,937,556, filed on Nov. 19, 2019 and Table 1 in International Applications WO2020/102645, and WO2020/102667, each of which is incorporated herein in their entirety.

[0539] The genomic sequences of various serotypes of AAV and the autonomous parvoviruses, as well as the sequences of the native inverted terminal repeats (ITRs), Rep proteins, and capsid subunits are known in the art. Such sequences may be found in the literature or in public databases such as GenBank. See, e.g., GenBank Accession Numbers NC 002077, NC_001401, NC_001729, NC_001863, NC 001829, NC 001862, NC 000883, NC_001701, NC 001510, NC_006152, NC_006261, AF063497, U89790, AF043303, AF028705, AF028704, J02275, J01901, J02275, X01457, AF288061, AH009962, AY028226, AY028223, NC 001358, NC_001540, AF513851, AF513852, AY530579; the disclosures of which are incorporated by reference herein for teaching parvovirus and AAV nucleic acid and amino acid sequences. See also, e.g., Srivistava et al., (1983) J Virology 45:555; Chiarini et al., (1998) J. Virology 71:6823; Chiarini et al., (1999) J. Virology 73:1309; Bantel-Schaal et al., (1999) J. Virology 73:939; Xiao et al., (1999) J. Virology 73:3994; Muramatsu et al., (1996) Virology 221:208; Shade et al., (1986) J. Viral. 58:921; Gao et al., (2002) Proc. Nat. Acad. Sci. USA 99:11854; Morris et al., (2004) Virology 33-:375-383; international patent publications WO 00/28061, WO 99/61601, WO 98/11244; and U.S. Pat. No. 6,156,303; the disclosures of which are incorporated by reference herein for teaching parvovirus and AAV nucleic acid and amino acid sequences. See also Table 1 and Table 5 disclosed in U.S. Pat. No. 62,937,556, filed on Nov. 19, 2019 or Table 1 as disclosed in International Applications WO2020/102645, and WO2020/102667, each of which is incorporated herein in their entirety. The capsid structures of autonomous parvoviruses and AAV are described in more detail in BERNARD N. FIELDS et al., VIROLOGY, volume 2, chapters 69 & 70 (4th ed., Lippincott-Raven Publishers). See also, description of the crystal structure of AAV2 (Xie et al., (2002) Proc. Nat. Acad. Sci. 99:10405-10), AAV4 (Padron et al., (2005) J. Viral. 79: 5047-58), AAV5 (Walters et al., (2004) J. Viral. 78: 3361-71) and CPV (Xie et al., (1996) J. Mal. Bio. 6:497-520 and Tsao et al., (1991) Science 251: 1456-64).

[0540] The term “tropism” as used herein refers to preferential entry of the virus into certain cells or tissues, optionally followed by expression (e.g., transcription and, optionally, translation) of a sequence(s) carried by the viral genome in the cell, e.g., for a recombinant virus, expression of a heterologous nucleic acid(s) of interest.

[0541] As used here, “systemic tropism” and “systemic transduction” (and equivalent terms) indicate that the virus capsid or virus vector of the invention exhibits tropism for and/or transduces tissues throughout the body (e.g., brain, lung, skeletal muscle, heart, liver, kidney and/or pancreas).

[0542] As used herein, “selective tropism” or “specific tropism” means delivery of virus vectors to and/or specific transduction of certain target cells and/or certain tissues.

[0543] Unless indicated otherwise, “efficient transduction” or “efficient tropism,” or similar terms, can be determined by reference to a suitable control (e.g., at least about 50%, 60%, 70%, 80%, 85%, 90%, 95%, 100%, 125%, 150%, 175%, 200%, 250%, 300%, 350%, 400%, 500% or more of the transduction or tropism, respectively, of the control). In particular embodiments, the virus vector efficiently transduces or has efficient tropism for liver cells and muscle cells. Suitable controls will depend on a variety of factors including the desired tropism and/or transduction profile.

[0544] Similarly, it can be determined if a virus “does not efficiently transduce” or “does not have efficient tropism” for a target tissue, or similar terms, by reference to a suitable control. In particular embodiments, the virus vector does not efficiently transduce (i.e., has does not have efficient tropism) for kidney, gonads and/or germ cells. In particular embodiments, transduction (e.g., undesirable transduction) of tissue(s) (e.g., kidney) is 20% or less, 10% or less, 5% or less, 1% or less, 0.1% or less of the level of transduction of the desired target tissue(s) (e.g., liver, skeletal muscle, diaphragm muscle, cardiac muscle and/or cells of the central nervous system).

[0545] As used herein, the term “polypeptide” encompasses both peptides and proteins, unless indicated otherwise.

[0546] A “polynucleotide” is a sequence of nucleotide bases, and may be RNA, DNA or DNA-RNA hybrid sequences (including both naturally occurring and non-naturally occurring nucleotides), but in representative embodiments are either single or double stranded DNA sequences.

[0547] The terms “heterologous nucleotide sequence” and “heterologous nucleic acid molecule” are used interchangeably herein and refer to a nucleic acid sequence that is not naturally occurring in the virus. Generally, the heterologous nucleic acid molecule or heterologous nucleotide sequence comprises an open reading frame that encodes a polypeptide and/or nontranslated RNA of interest (e.g., for delivery to a cell and/or subject).

[0548] A “chimeric nucleic acid” comprises two or more nucleic acid sequences covalently linked together to encode a fusion polypeptide. The nucleic acids may be DNA, RNA, or a hybrid thereof.

[0549] The term “fusion polypeptide” comprises two or more polypeptides covalently linked together, typically by peptide bonding.

[0550] As used herein, an “isolated” polynucleotide (e.g., an “isolated DNA” or an “isolated RNA”) means a polynucleotide at least partially separated from at least some of the other components of the naturally occurring organism or virus, for example; the cell or viral structural components or other polypeptides or nucleic acids commonly found associated with the polynucleotide. In representative embodiments an “isolated” nucleotide is enriched by at least about 10-fold, 100′-fold, 1000-fold, 10,000-fold or more as compared with the starting material.

[0551] Likewise, an “isolated” polypeptide means a polypeptide that is at least partially separated from at least some of the other components of the naturally occurring organism or virus, for example, the cell or viral structural components or other polypeptides or nucleic acids commonly found associated with the polypeptide. In representative embodiments an “isolated” polypeptide is enriched by at least about 10-fold, 100-fold, 1000-fold, 10,000-fold or more as compared with the starting material.

[0552] An “isolated cell” refers to a cell that is separated from other components with which it is normally associated in its natural state. For example, an isolated cell can be a cell in culture medium and/or a cell in a pharmaceutically acceptable carrier of this invention. Thus, an isolated cell can be delivered to and/or introduced into a subject. In some embodiments, an isolated cell can be a cell that is removed from a subject and manipulated as described herein ex vivo and then returned to the subject.

[0553] A population of virions can be generated by any of the methods described herein. In one embodiment, the population is at least 101 virions. In one embodiment, the population is at least 102 virions, at least 103, virions, at least 104 virions, at least 105 virions, at least 106 virions, at least 107 virions, at least 108 virions, at least 109 virions, at least 1010 virions, at least 1011 virions, at least 1012 virions, at least 1013 virions, at least 1014 virions, at least 1015 virions, at least 1016 virions, or at least 1017 virions. A population of virions can be heterogeneous or can be homogeneous (e.g., substantially homogeneous or completely homogeneous).

[0554] A “substantially homogeneous population” as the term is used herein, refers to a population of virions that are mostly identical, with few to no contaminant virions (those that are not identical) therein. A substantially homogeneous population is at least 90% of identical virions (e.g., the desired virion), and can be at least 91%, at least 92%, at least 93%, at least 94%, at least 95%, at least 96%, at least 97%, at least 98%, at least 99%, at least 99.5%, at least 99.9% of identical virions.

[0555] A population of virions that is completely homogeneous contains only identical virions.

[0556] As used herein, by “isolate” or “purify” (or grammatical equivalents) a virus vector or virus particle or population of virus particles, it is meant that the virus vector or virus particle or population of virus particles is at least partially separated from at least some of the other components in the starting material. In representative embodiments an “isolated” or “purified” virus vector or virus particle or population of virus particles is enriched by at least about 10-fold, 100-fold, 1000-fold, 10,000-fold or more as compared with the starting material.

[0557] Unless indicated otherwise, “efficient transduction” or “efficient tropism,” or similar terms, can be determined by reference to a suitable control (e.g., at least about 10%, 15%, 20%, 25%, 30%, 35%, 40%, 45%, 50%, 55%, 60%, 65%, 70%, 75%, 80%, 85%, 90%, 95%, 100%, 125%, 150%, 175%, 200%, 250%, 300%, 350%, 400%, 500% or more of the transduction or tropism, respectively, of the control). In particular embodiments, the virus vector efficiently transduces or has efficient tropism for neuronal cells and cardiomyocytes. Suitable controls will depend on a variety of factors including the desired tropism and/or transduction profile.

[0558] A “therapeutic polypeptide” is a polypeptide that can alleviate, reduce, prevent, delay and/or stabilize symptoms that result from an absence or defect in a protein in a cell or subject and/or is a polypeptide that otherwise confers a benefit to a subject, e.g., enzyme replacement to reduce or eliminate symptoms of a disease, or improvement in transplant survivability or induction of an immune response.

[0559] The terms “heterologous nucleotide sequence” and “heterologous nucleic acid molecule” are used interchangeably herein and refer to a nucleic acid sequence that is not naturally occurring in the virus. Generally, the heterologous nucleic acid molecule or heterologous nucleotide sequence comprises an open reading frame that encodes a polypeptide and/or nontranslated RNA of interest (e.g., for delivery to a cell and/or subject), for example the GAA polypeptide.

[0560] As used herein, the terms “virus vector,” “vector” or “gene delivery vector” refer to a virus (e.g., AAV) particle that functions as a nucleic acid delivery vehicle, and which comprises the vector genome (e.g., viral DNA [vDNA]) packaged within a virion. Alternatively, in some contexts, the term “vector” may be used to refer to the vector genome/vDNA alone.

[0561] An “rAAV vector genome” or “rAAV genome” is an AAV genome (i.e., vDNA) that comprises one or more heterologous nucleic acid sequences. rAAV vectors generally require only the inverted terminal repeat(s) (TR(s)) in cis to generate virus. All other viral sequences are dispensable and may be supplied in trans (Muzyczka, (1992) Curr. Topics Microbial. Immunol. 158:97). Typically, the rAAV vector genome will only retain the one or more TR sequence so as to maximize the size of the transgene that can be efficiently packaged by the vector. The structural and non-structural protein coding sequences may be provided in trans (e.g., from a vector, such as a plasmid, or by stably integrating the sequences into a packaging cell). In embodiments of the invention the rAAV vector genome comprises at least one ITR sequence (e.g., AAV TR sequence), optionally two ITRs (e.g., two AAV TRs), which typically will be at the 5′ and 3′ ends of the vector genome and flank the heterologous nucleic acid, but need not be contiguous thereto. The TRs can be the same or different from each other.

[0562] The term “terminal repeat” or “TR” includes any viral terminal repeat or synthetic sequence that forms a hairpin structure and functions as an inverted terminal repeat (i.e., an ITR that mediates the desired functions such as replication, virus packaging, integration and/or provirus rescue, and the like). The TR can be an AAV TR or a non-AAV TR. For example, a non-AAV TR sequence such as those of other parvoviruses (e.g., canine parvovirus (CPV), mouse parvovirus (MVM), human parvovirus B-19) or any other suitable virus sequence (e.g., the SV40 hairpin that serves as the origin of SV40 replication) can be used as a TR, which can further be modified by truncation, substitution, deletion, insertion and/or addition. Further, the TR can be partially or completely synthetic, such as the “double-D sequence” as described in U.S. Pat. No. 5,478,745 to Samulski et al.

[0563] An “AAV terminal repeat” or “AAV TR,” including an “AAV inverted terminal repeat” or “AAV ITR” may be from any AAV, including but not limited to serotypes 1, 2, 3, 4, 5, 6, 7, 8, 9, 10, 11 or 12 or any other AAV now known or later discovered. An AAV terminal repeat need not have the native terminal repeat sequence (e.g., a native AAV TR or AAV ITR sequence may be altered by insertion, deletion, truncation and/or missense mutations), as long as the terminal repeat mediates the desired functions, e.g., replication, virus packaging, integration, and/or provirus rescue, and the like.

[0564] AAV proteins VP1, VP2 and VP3 are capsid proteins that interact together to form an AAV capsid of an icosahedral symmetry. VP1.5 is an AAV capsid protein described in US Publication No. 2014/0037585.

[0565] The virus vectors of the invention can further be “targeted” virus vectors (e.g., having a directed tropism) and/or a “hybrid” parvovirus (i.e., in which the viral TRs and viral capsid are from different parvoviruses) as described in international patent publication WO 00/28004 and Chao et al., (2000) Molecular Therapy 2:619.

[0566] The virus vectors of the invention can further be duplexed parvovirus particles as described in international patent publication WO 01/92551 (the disclosure of which is incorporated herein by reference in its entirety). Thus, in some embodiments, double stranded (duplex) genomes can be packaged into the virus capsids of the invention.

[0567] Further, the viral capsid or genomic elements can contain other modifications, including insertions, deletions and/or substitutions.

[0568] A “chimeric’ capsid protein as used herein means an AAV capsid protein (e.g., any one or more of VP1, VP2 or VP3) that has been modified by substitutions in one or more (e.g., 2, 3, 4, 5, 6, 7, 8, 9, 10, etc.) amino acid residues in the amino acid sequence of the capsid protein relative to wild type, as well as insertions and/or deletions of one or more (e.g., 2, 3, 4, 5, 6, 7, 8, 9, 10, etc.) amino acid residues in the amino acid sequence relative to wild type. In some embodiments, complete or partial domains, functional regions, epitopes, etc., from one AAV serotype can replace the corresponding wild type domain, functional region, epitope, etc. of a different AAV serotype, in any combination, to produce a chimeric capsid protein of this invention. Production of a chimeric capsid protein can be carried out according to protocols well known in the art and a significant number of chimeric capsid proteins are described in the literature as well as herein that can be included in the capsid of this invention.

[0569] As used herein, the term “haploid AAV” shall mean that AAV as described in International Application WO2018/170310, or US Application US2018/037149, which are incorporated herein in their entirety by reference. In some embodiments, a population of virions is a haploid AAV population where a virion particle can be constructed wherein at least one viral protein from the group consisting of AAV capsid proteins, VP1, VP2 and VP3, is different from at least one of the other viral proteins, required to form the virion particle capable of encapsulating an AAV genome. For each viral protein present (VP1, VP2, and/or VP3), that protein is the same type (e.g., all AAV2 VP1). In one instance, at least one of the viral proteins is a chimeric viral protein and at least one of the other two viral proteins is not a chimeric. In one embodiment VP1 and VP2 are chimeric and only VP3 is non-chimeric. For example, only the viral particle composed of VP1/VP2 from the chimeric AAV2/8 (the N-terminus of AAV2 and the C-terminus of AAV8) paired with only VP3 from AAV2; or only the chimeric VP1/VP2 28m-2P3 (the N-terminal from AAV8 and the C-terminal from AAV2 without mutation of VP3 start codon) paired with only VP3 from AAV2. In another embodiment only VP3 is chimeric and VP1 and VP2 are non-chimeric. In another embodiment at least one of the viral proteins is from a completely different serotype. For example, only the chimeric VP1/VP2 28m-2P3 paired with VP3 from only AAV3. In another example, no chimeric is present.

[0570] The term a “hybrid” AAV vector or parvovirus refers to a rAAV vector where the viral TRs or ITRs and viral capsid are from different parvoviruses. Hybrid vectors are described in international patent publication WO 00/28004 and Chao et al., (2000) Molecular Therapy 2:619. For example, a hybrid AAV vector typically comprises the adenovirus 5′ and 3′ cis ITR sequences sufficient for adenovirus replication and packaging (i.e., the adenovirus terminal repeats and PAC sequence).

[0571] The term “polyploid AAV” refers to a AAV vector which is composed of capsids from two or more AAV serotypes, e.g., and can take advantages from individual serotypes for higher transduction but not in certain embodiments eliminate the tropism from the parents.

[0572] The term “GAA” or “GAA polypeptide,” as used herein, encompasses mature (˜76 or ˜67 kDa) and precursor (e.g., ˜110 kDa) GAA as well as modified (e.g., truncated or mutated by insertion(s), deletion(s) and/or substitution(s)) GAA proteins or fragments thereof that retain biological function (i.e., have at least one biological activity of the native GAA protein, e.g., can hydrolyze glycogen, as defined above) and GAA variants (e.g., GAA II as described by Kunita et al., (1997) Biochemica et Biophysica Acta 1362:269; GAA polymorphisms and SNPs are described by Hirschhorn, R. and Reuser, A. J. (2001) in The Metabolic and Molecular Basis for Inherited Disease (Scriver, C. R., Beaudet. A. L., Sly, W. S. & Valle, D. Eds.), pp. 3389-3419, McGraw-Hill, New York, see pages 3403-3405; each incorporated herein by reference in its entirety). Any GAA coding sequence known in the art may be used, for example, see the coding sequences of FIGS. 8 and 9; GenBank Accession number NM_00152 and Hoefsloot et al., (1988) EMBO J. 7:1697 and Van Hove et al., (1996) Proc. Natl. Acad. Sci. USA 93:65 (human), GenBank Accession number NM_008064 (mouse), and Kunita et al., (1997) Biochemica et Biophysics Acta 1362:269 (quail); the disclosures of which are incorporated herein by reference for their teachings of GAA coding and noncoding sequences. The term “GAA”, or, “hGAA” or, “rhGAA” is used interchangeably to refer to nucleic acid encoding human GAA or, to human GAA polypeptide.

[0573] The term “targeting peptide” is also referred to as a “targeting sequence” as used herein is intended to refer to a peptide that targets a particular subcellular compartment, for example, a mammalian lysosome. A targeting peptide encompassed for use herein is a lysosome targeting peptide that is mannose-6-phosphate-independent. An exemplary targeting sequence is an IGF2 targeting peptide as disclosed herein.

[0574] The term “signal sequence” is used interchangeably herein with the term “secretory signal sequence” or “leader sequence” or “signal peptide” or variations thereof, and intended to refer to amino acid sequences that function to enhance (as defined above) secretion of an operably linked polypeptide, (e.g., a GAA peptide) from the cell as compared with the level of secretion seen with the native polypeptide. As defined above, by “enhanced” secretion, it is meant that the relative proportion of GAA polypeptide synthesized by the cell that is secreted from the cell is increased; it is not necessary that the absolute amount of secreted protein is also increased. In particular embodiments of the invention, essentially all (i.e., at least 95%, 97%, 98%, 99% or more) of the GAA-polypeptide is secreted. It is not necessary, however, that essentially all or even most of the GAA polypeptide is secreted, as long as the level of secretion is enhanced as compared with the native GAA polypeptide. Exemplary leader sequences include, but are not limited to the innate GAA signal sequence (also referred to as endogenous GAA signal sequence), AAT sequence, IL2(1-3), IL2 leader sequence (IL2 wt), a modified IL2 leader sequence (IL2 mut), fibronectin (FN1, also referred to as FBN), or IgG leader sequence or functional variants thereof, as disclosed herein.

[0575] As used herein, the term “amino acid” encompasses any naturally occurring amino acid, modified forms thereof, and synthetic amino acids. Naturally occurring, levorotatory (L-) amino acids are disclosed in Table 2 of US Publication 2018/0371496, which is incorporated herein in its entirety. Alternatively, the amino acid can be a modified amino acid residue (nonlimiting examples are shown in Table 4 of US Publication of US Publication 2018/0371496) and/or can be an amino acid that is modified by post-translation modification (e.g., acetylation, amidation, formylation, hydroxylation, methylation, phosphorylation or sulfatation). Further, the non-naturally occurring amino acid can be an “unnatural” amino acid as described by Wang et al., Annu Rev Biophys Biomol Struct. 35:225-49 (2006). These unnatural amino acids can advantageously be used to chemically link molecules of interest to the AAV capsid protein.

[0576] To illustrate further, if, for example, the specification indicates that a particular amino acid can be selected from A, G, I, L and/or V, this language also indicates that the amino acid can be selected from any subset of these amino acid(s) for example A, G, I or L; A, G, I or V; A or G; only L; etc. as if each such subcombination is expressly set forth herein. Moreover, such language also indicates that one or more of the specified amino acids can be disclaimed (e.g., by negative proviso). For example, in particular embodiments the amino acid is not A, G or I; is not A; is not G or V; etc. as if each such possible disclaimer is expressly set forth herein.

[0577] As used herein, the phrase “promoter” refers to a region of DNA that generally is located upstream of a nucleic acid sequence to be transcribed that is needed for transcription to occur, i.e. which initiates transcription. Promoters permit the proper activation or repression of transcription of a coding sequence under their control. A promoter typically contains specific sequences that are recognized and bound by plurality of TFs. TFs bind to the promoter sequences and result in the recruitment of RNA polymerase, an enzyme that synthesizes RNA from the coding region of the gene. A great many promoters are known in the art.

[0578] The term “synthetic promoter” as used herein relates to a promoter that does not occur in nature. Parts of the synthetic promoter may be naturally occurring (e.g. the minimal promoter), but the synthetic promoter as a complete entity is not naturally occurring.

[0579] As used herein, “minimal promoter” (also known as the “core promoter”) refers to a short DNA segment which is inactive or largely inactive by itself, but can mediate transcription when combined with other transcription regulatory elements. Minimum promoter sequence can be derived from various different sources, including prokaryotic and eukaryotic genes. Examples of minimal promoters are discussed above, and include the dopamine beta-hydroxylase gene minimum promoter, cytomegalovirus (CMV) immediate early gene minimum promoter (CMV-MP), and the herpes thymidine kinase minimal promoter (MinTK). A minimal promoter typically comprises the transcription start site (TSS) and elements directly upstream, a binding site for RNA polymerase II, and general transcription factor binding sites (often a TATA box).

[0580] As used herein, “proximal promoter” relates to the minimal promoter plus the proximal sequence upstream of the gene that tends to contain primary regulatory elements. It often extends approximately 250 base pairs upstream of the TSS, and includes specific TFBS. The proximal promoter can be a naturally occurring liver-specific proximal promoter. However, the proximal promoter can be synthetic.

[0581] A “functional variant” of a promoter or other nucleic acid sequence in the context of the present invention is a variant of a reference sequence that retains the ability to function in the same way as the reference sequence, e.g. as a liver-specific promoter. Alternative terms for such functional variants include “biological equivalents” or “equivalents”.

[0582] The terms “liver-specific” or “liver-specific expression” when in reference to a promoter refers to the ability of promoter to enhance or drive expression of a gene in the liver (or in liver-derived cells) in a preferential or predominant manner as compared to other tissues (e.g. spleen, muscle, heart, lung, and brain). Expression of the gene can be in the form of mRNA or protein. In some embodiments, liver-specific expression is such that there is negligible expression in other (i.e. non-liver) tissues or cells, i.e. expression is highly liver-specific. In some embodiments, while a liver-specific promoter drives expression preferentially in the liver, it can also drive expression of the gene in another tissue of interest at a lower level, e.g., muscle.

[0583] The skilled person can thus easily determine whether any variant of the liver-specific promoter recited above remains functional (i.e. it is a functional variant as defined above). For example, any given promoter to be assessed can be operably linked to a minimal promoter (e.g. positioned upstream of CMV-MP) and the ability of the promoter to drive liver-specific expression of a gene (typically a reporter gene) is measured. Similarly, the ability of a promoter to drive liver-specific expression can be readily assessed by the skilled person (e.g. as described in the examples below). Expression levels of a gene driven by a variant of a reference promoter can be compared to the expression levels driven by the reference sequence. In some embodiments, where liver-specific expression levels driven by a variant promoter are at least 50%, at least 60%, at least 70%, at least 80%, at least 90%, or at least 100% of the expression levels driven by the reference promoter, it can be said that the variant remains functional. Suitable nucleic acid constructs and reporter assays to assess liver-specific expression enhancement can easily be constructed, and the examples set out below give suitable methodologies.

[0584] Liver-specificity can be identified wherein the expression of a gene (e.g. a therapeutic or reporter gene) occurs preferentially or predominantly in liver-derived cells. Preferential or predominant expression can be defined, for example, where the level of expression is significantly greater in liver-derived cells than in other types of cells (i.e. non-liver-derived cells). For example, expression in liver-derived cells is suitably at least 5-fold higher than non-liver cells, preferably at least 10-fold higher than non-liver cells, and it may be 50-fold higher or more in some cases. For convenience, liver-specific expression can suitably be demonstrated via a comparison of expression levels in a hepatic cell line (e.g. liver-derived cell line such as Huh7 and/or HepG2 cells) or liver primary cells, compared with expression levels in a kidney-derived cell line (e.g. HEK-293), a cervical tissue-derived cell line (e.g. HeLa) and/or a lung-derived cell line (e.g. A549).

[0585] The synthetic liver-specific promoters of the present invention are preferably suitable for promoting expression in the liver of a subject, e.g., driving liver-specific expression of a transgene, preferably a therapeutic transgene.

[0586] Preferred synthetic liver-specific promoters of the present invention are suitable for promoting liver-specific transgene expression and have an activity in liver cells which is at least 15%, 20%, 30%, 40%, 50%, 60%, 70%, 80%, 90%, 100%, 125%, 150%, 175%, 200%, 250%, 300%, 350% or 400% of the activity of the TBG promoter (see, e.g., SEQ ID NO: 435 as disclosed in International Application WO2021102107).

[0587] The synthetic liver-specific promoters of the present invention are preferably suitable for promoting liver-specific expression at a level at least 1.5-fold greater than a CMV-IE promoter (see, e.g., SEQ ID NO: 433 as disclosed in International Application WO2021102107) in liver-derived cells, preferably at least 2-fold greater than a CMV promoter in liver-derived cells (e.g. HEK-293, HeLa, and/or A549 cells).

[0588] The terms “identity” and “identical” and the like refer to the sequence similarity between two polymeric molecules, e.g., between two nucleic acid molecules, such as between two DNA molecules. Sequence alignments and determination of sequence identity can be done, e.g., using the Basic Local Alignment Search Tool (BLAST) originally described by Altschul et al. 1990 (J Mol Biol 215: 403-10), such as the “Blast 2 sequences” algorithm described by Tatusova and Madden 1999 (FEMS Microbiol Lett 174: 247-250).

[0589] The term “synthetic” as used herein means a nucleic acid molecule that does not occur in nature. Synthetic nucleic acid expression constructs of the present invention are produced artificially, typically by recombinant technologies. Such synthetic nucleic acids may contain naturally occurring sequences (e.g. promoter, enhancer, intron, and other such regulatory sequences), but these are present in a non-naturally occurring context. For example, a synthetic gene (or portion of a gene) typically contains one or more nucleic acid sequences that are not contiguous in nature (chimeric sequences), and/or may encompass substitutions, insertions, and deletions and combinations thereof.

[0590] A “spacer sequence” or “spacer” as used herein is a nucleic acid sequence that separates two functional nucleic acid sequences. It can have essentially any sequence, provided it does not prevent the functional nucleic acid sequence (e.g. cis-regulatory element) from functioning as desired (e.g. this could happen if it includes a silencer sequence, prevents binding of the desired transcription factor, or suchlike). Typically, it is non-functional, as in it is present only to space adjacent functional nucleic acid sequences from one another.

[0591] The term “pharmaceutically acceptable” as used herein is consistent with the art and means compatible with the other ingredients of the pharmaceutical composition and not deleterious to the recipient thereof.

[0592] By the terms “treat,” “treating” or “treatment of” (and grammatical variations thereof) it is meant that the severity of the subject's condition is reduced, at least partially improved or stabilized and/or that some alleviation, mitigation, decrease or stabilization in at least one clinical symptom is achieved and/or there is a delay in the progression of the disease or disorder.

[0593] The terms “prevent,” “preventing” and “prevention” (and grammatical variations thereof) refer to prevention and/or delay of the onset of a disease, disorder and/or a clinical symptom(s) in a subject and/or a reduction in the severity of the onset of the disease, disorder and/or clinical symptom(s) relative to what would occur in the absence of the methods of the invention. The prevention can be complete, e.g., the total absence of the disease, disorder and/or clinical symptom(s).

[0594] The prevention can also be partial, such that the occurrence of the disease, disorder and/or clinical symptom(s) in the subject and/or the severity of onset is substantially less than what would occur in the absence of the present invention.

[0595] A “treatment effective” amount as used herein is an amount that is sufficient to provide some improvement or benefit to the subject. Alternatively stated, a “treatment effective” amount is an amount that will provide some alleviation, mitigation, decrease or stabilization in at least one clinical symptom in the subject. Those skilled in the art will appreciate that the therapeutic effects need not be complete or curative, as long as some benefit is provided to the subject.

[0596] A “prevention effective” amount as used herein is an amount that is sufficient to prevent and/or delay the onset of a disease, disorder and/or clinical symptoms in a subject and/or to reduce and/or delay the severity of the onset of a disease, disorder and/or clinical symptoms in a subject relative to what would occur in the absence of the methods of the invention. Those skilled in the art will appreciate that the level of prevention need not be complete, as long as some preventative benefit is provided to the subject.

[0597] The phrase a “therapeutically effective amount” and like phrases mean a dose or plasma concentration in a subject that provides the desired specific pharmacological effect, e.g. to express a therapeutic gene in the liver, and secretion into the plasma. It is emphasized that a therapeutically effective amount may not always be effective in treating the conditions described herein, even though such dosage is deemed to be a therapeutically effective amount by those of skill in the art. The therapeutically effective amount may vary based on the route of administration and dosage form, the age and weight of the subject, and/or the disease or condition being treated.

[0598] The terms “individual,” “subject,” and “patient” are used interchangeably, and refer to any individual subject with a disease or condition in need of treatment. For the purposes of the present disclosure, the subject may be a primate, preferably a human, or another mammal, such as a dog, cat, horse, pig, goat, or bovine, and the like.

[0599] Additional patents incorporated for reference herein that are related to, disclose or describe an AAV or an aspect of an AAV, including the DNA vector that includes the gene of interest to be expressed are: U.S. Pat. Nos. 6,491,907; 7,229,823; 7,790,154; 7,201898; 7,071,172; 7,892,809; 7,867,484; 8,889,641; 9,169,494; 9,169,492; 9,441,206; 9,409,953; and, 9,447,433; 9,592,247; and, 9,737,618.

[0600] The invention provided herein can further be described in any of the following numbered paragraphs:
[0601] 1. A recombinant adenovirus associated (rAAV) vector comprising in its genome:
[0602] a. 5′ and 3′ AAV inverted terminal repeats (ITR) sequences, and
[0603] b. located between the 5′ and 3′ ITRs, a heterologous nucleic acid sequence encoding all or a portion of an endogenous GAA signal peptide, a heterologous signal peptide and an alpha-glucosidase (GAA) polypeptide,
[0604] wherein the GAA polypeptide comprises amino acid residues 28-952 of SEQ ID NO: 1, 57-952 of SEQ ID NO:1, or comprises a N-terminal GAA polypeptide fragment comprising amino acids 28, 28-29, 28-30, 28-31, 28-32, or 28-33 of SEQ ID NO: 1 and a deletion of any number of amino acids from the next about 5 amino acids to about 40 amino acids after the N terminal GAA polypeptide fragment of SEQ ID NO: 1, and wherein the heterologous signal peptide can be inserted immediately after the N-terminal GAA polypeptide fragment and before the remaining amino acids of the GAA polypeptide, wherein the heterologous signal peptide is optionally fused at position 57 of the remaining amino acids of the GAA polypeptide, and where the GAA polypeptide can extend to amino acid 952 of SEQ ID NO: 1, or a functional fragment thereof, and
[0605] wherein the nucleic acid sequence encoding the GAA polypeptide can be codon optimized, and wherein the heterologous nucleic acid is operatively linked to a liver-specific promoter and a poly A sequence.
[0606] 2. The recombinant AAV vector of paragraph 1, where the codon optimized nucleic acid sequence encoding the GAA polypeptide is selected from the group consisting of SEQ ID NO: 1-18, or functional fragment thereofs.
[0607] 3. The recombinant AAV vector of any of the preceding paragraphs, which comprises the nucleic acid sequence of SEQ ID NO: 23, or a functional variant thereof.
[0608] 4. The recombinant AAV vector of any of the preceding paragraphs, wherein the heterologous nucleic acid sequence encodes a GAA protein comprising a signal peptide fused to the GAA polypeptide, wherein the signal peptide is an endogenous GAA signal peptide, or a heterologous signal peptide, or a combination thereof.
[0609] 5. The recombinant AAV vector of any of the preceding paragraphs, wherein the nucleic acid encoding SEQ ID NO: 3 is wildtype.
[0610] 6. The recombinant AAV vector of any of the preceding paragraphs, further comprising at least one of a UTR, or a reverse RNA polII terminator sequence.
[0611] 7. The recombinant AAV vector of any of the preceding paragraphs, wherein the AAV genome comprises, in the 5′ to 3′ direction:
[0612] a. a 5′ ITR,
[0613] b. a liver-specific promoter sequence,
[0614] c. an 5′ UTR sequence,
[0615] d. a nucleic acid encoding a portion or all of the endogenous GAA signal peptide,
[0616] e. a nucleic acid encoding a heterologous signal peptide or the N-terminal GAA polypeptide fragment,
[0617] f. a nucleic acid encoding an alpha-glucosidase (GAA) polypeptide, wherein the GAA polypeptide is functionally active,
[0618] g. a poly A sequence, and
[0619] h. a reverse RNA pol II terminator sequence.
[0620] 8. The recombinant AAV vector of any of the preceding paragraphs, wherein the UTR is 5′ or 3′.
[0621] 9. The recombinant AAV vector of any of the preceding paragraphs, wherein nucleic acid encoding the signal peptide encodes a signal sequence is selected from any of: an endogenous GAA signal peptide, a fibronectin signal peptide (FN1), a IL-2 wt signal peptide, modified IL-2 signal peptide, IL2(1-3) signal peptide, IgG signal peptide, a AAT signal peptide, a A2M signal peptide, or a PZP signal peptide, or an active fragment thereof having signal peptide activity.
[0622] 10. The recombinant AAV vector of any of the preceding paragraphs, wherein the nucleic acid sequence encodes a GAA polypeptide having the amino acid sequence of SEQ ID NO: 1, or a polypeptide having at least 80% sequence identity to SEQ ID NO: 1 where amino acid residue 199 is a R (199R), amino acid residue 223 is a H (223H) and amino acid residue 780 is a I (780I).
[0623] 11. The recombinant AAV vector of any of the preceding paragraphs, wherein the nucleic acid sequence encoding the GAA polypeptide is SEQ ID NO: 3, or a nucleic acid sequence having at least 80%, or at least 85%, or at least 90% sequence identity to SEQ ID NO: 3 that encodes a GAA polypeptide having at least 80% sequence identity to SEQ ID NO: 1 where amino acid residue 199 is a R (199R), amino acid residue 223 is a H (223H) and amino acid residue 780 is a I (780I).
[0624] 12. The recombinant AAV vector of any of the preceding paragraphs, wherein the 5′ UTR sequence comprises SEQ ID NO: 41, or a nucleic acid having at least 80% sequence identity to SEQ ID NO: 41.
[0625] 13. The recombinant AAV vector of any of the preceding paragraphs, wherein the 5′ UTR sequence comprises SEQ ID NO: 40, or a nucleic acid having at least 80% sequence identity to SEQ ID NO: 40.
[0626] 14. The recombinant AAV vector of any of the preceding paragraphs, further comprising an intron sequence located 5′ of the nucleic acid sequence encoding the signal peptide, and 3′ of the promoter.
[0627] 15. The recombinant AAV vector of any of the preceding paragraphs, wherein the intron sequence is selected from the group consisting of: MVM sequence, a HBB2 sequence, an CMVIE intron sequence, or a UBC intron sequence or a SV40 sequence.
[0628] 16. The recombinant AAV vector of any of the preceding paragraphs, wherein the GAA polypeptide is a N-terminal truncated GAA polypeptide selected from any disclosed in Table 1.
[0629] 17. The recombinant AAV vector of any of the preceding paragraphs, further comprising at least one polyA sequence located 3′ of the nucleic acid encoding the GAA gene and 5′ of the 3′ ITR sequence.
[0630] 18. The recombinant AAV vector of any of the preceding paragraphs, wherein the heterologous nucleic acid sequence further comprises a 3′ UTR sequence, wherein the 3′ UTR sequence is located 3′ of the nucleic acid encoding the GAA polypeptide and 5′ of the 3′ ITR sequence, or is located between the nucleic acid encoding the GAA polypeptide and the poly A sequence, or RNA pol II terminator sequence.
[0631] 19. The recombinant AAV vector of any of the preceding paragraphs, wherein the heterologous nucleic acid sequence further comprises a 3′ intron sequence, wherein the 3′ intron sequence is located 3′ of the nucleic acid encoding the GAA polypeptide and 5′ of the 3′ ITR sequence, or is located between the nucleic acid encoding the GAA polypeptide and the poly A sequence or RNA polII terminator sequence.
[0632] 20. The recombinant AAV vector of any of the preceding paragraphs, wherein the ITR comprises an insertion, deletion or substitution.
[0633] 21. The recombinant AAV vector of any of the preceding paragraphs, wherein one or more CpG islands in the ITR are removed.
[0634] 22. The recombinant AAV vector of any of the preceding paragraphs, wherein
[0635] a. the nucleic acid encoding the signal peptide is selected from any of the group consisting of:
   [0636] AAT signal peptide (e.g., SEQ ID NO: 67), or an active fragment thereof having secretory signal activity, e.g., a nucleic acid encoding an amino acid sequence that has at least about 75%, or 80%, or 85%, or 90%, or 95%, or 98%, or 99% sequence identity to SEQ ID NO: 67;
   [0637] a fibronectin signal peptide (FN1) (e.g., SEQ ID NO: 73-75), or an active fragment thereof having secretory signal activity, e.g., a nucleic acid encoding an amino acid sequence that has at least about 75%, or 80%, or 85%, or 90%, or 95%, or 98%, or 99% sequence identity to SEQ ID NO: 73-75;
   [0638] an endogenous GAA signal peptide (SEQ ID NO: 51), or an active fragment thereof having secretory signal activity, e.g., a nucleic acid encoding an amino acid sequence that has at least about 75%, or 80%, or 85%, or 90%, or 95%, or 98%, or 99% sequence identity to SEQ ID NO: 51;
   [0639] an hIGF2 signal peptide (e.g., SEQ ID NO: 72), or an active fragment thereof having secretory signal activity, e.g., a nucleic acid encoding an amino acid sequence that has at least about 75%, or 80%, or 85%, or 90%, or 95%, or 98%, or 99% sequence identity to SEQ ID NO: 72;
   [0640] a IgG1 (201) signal peptide (SEQ ID NO: 54), or an active fragment thereof having secretory signal activity, e.g., a nucleic acid encoding an amino acid sequence that has at least about 75%, or 80%, or 85%, or 90%, or 95%, or 98%, or 99% sequence identity to SEQ ID NO: 54;
   [0641] wtIL2 leader peptide (SEQ ID NO: 55), or an active fragment thereof having secretory signal activity, e.g., a nucleic acid encoding an amino acid sequence that has at least about 75%, or 80%, or 85%, or 90%, or 95%, or 98%, or 99% sequence identity to SEQ ID NO: 55;
   [0642] mutant IL2 leader peptide (SEQ ID NO: 56) or an active fragment thereof having secretory signal activity, e.g., a nucleic acid encoding an amino acid sequence that has at least about 75%, or 80%, or 85%, or 90%, or 95%, or 98%, or 99% sequence identity to SEQ ID NO: 56; and
[0643] b. the nucleic acid encoding the GAA polypeptide is selected from any of the group consisting of: SEQ ID NO: 3, SEQ ID NO: 4, SEQ ID NO: 5, SEQ ID NO: 6, SEQ ID NO: 7, SEQ ID NO: 8, SEQ ID NO: 9, SEQ ID NO: 10, SEQ ID NO: 11, SEQ ID NO: 12, SEQ ID NO: 13, SEQ ID NO: 14, SEQ ID NO: 15, SEQ ID NO: 16, SEQ ID NO: 17, SEQ ID NO: 18 or a nucleic acid sequence having at least 60%, or 70%, or 80%, 85% or 90% or 95%, or 98%, or 99% sequence identity to SEQ ID NOS: 1-18.
[0644] 23. The recombinant AAV vector of any of the preceding paragraphs, wherein the nucleic acid encoding the GAA polypeptide is selected from SEQ ID NO: 3, or a nucleic acid sequence having at least 60%, or 70%, or 80%, 85% or 90% or 95%, or 98%, or 99% sequence identity to SEQ ID NO: 3 which encodes a GAA polypeptide at least 85% sequence identity to SEQ ID NO: 1 where amino acid residue 199 is a R (199R), amino acid residue 223 is a H (223H) and amino acid residue 780 is a I (780I).
[0645] 24. The recombinant AAV vector of any of the preceding paragraphs, wherein the nucleic acid encoding the GAA polypeptide encodes a GAA polypeptide beginning at any of amino acid residues 35, 40, 50, 57, 60, 68, 69, 70, 72, 74, 779, 790, 791, 792, 793, or 796 of SEQ ID NO: 1 or a sequence 80% identical to SEQ ID NO: 1 where amino acid residue 199 is a R (199R), amino acid residue 223 is a H (223H) and amino acid residue 780 is a I (780I).
[0646] 25. The recombinant AAV vector of any of the preceding paragraphs, wherein the GAA polypeptide has an endogenous GAA signal peptide attached, or a heterologous signal peptide attached to the N-terminal of the GAA polypeptide, wherein the endogenous signal peptide has the amino acid sequence of SEQ ID NO: 59 or a sequence at least 80% sequence identity to SEQ ID NO: 59, and the heterologous signal peptide is selected from the group consisting of: SEQ ID NO: 60 (201 IgG signal peptide), or an IL2 wild type signal peptide (SEQ ID NO: 61), modified IL2 signal peptide (SEQ ID NO: 62), A2M signal peptide (SEQ ID NO: 63), or PZP signal peptide (SEQ ID NO: 64), or artificial signal peptide (SEQ ID NO: 65), or cathpetsin L signal peptide (SEQ ID NO: 66) or signal peptides at least 90% sequence identity to SEQ ID NOS: 60-66.
[0647] 26. The recombinant AAV vector of any of the preceding paragraphs, wherein the liver specific promoter is selected from any of: SEQ ID NOS: 86, 88, 91-96, 146-150 or 439-441, or a liver specific promoter having at least 80% sequence identity to SEQ ID NOs: 86, 88, 91-96, 146-150 or 439-441.
[0648] 27. The recombinant AAV vector of any of the preceding paragraphs, wherein the liver specific promoter is selected from any of: SEQ ID NOS: 98 or 99, or a liver specific promoter having at least 80% sequence identity to SEQ ID NOs: 98 or 99.
[0649] 28. The recombinant AAV vector of any of the preceding paragraphs, wherein the liver specific promoter is SEQ ID NOS: 97, or a liver specific promoter having at least 80% sequence identity to SEQ ID NO: 97.
[0650] 29. The recombinant AAV vector of any of the preceding paragraphs, wherein the recombinant vector is manufactured from the plasmid of SEQ ID NO: 27.
[0651] 30. The recombinant AAV vector of any of the preceding paragraphs, wherein the nucleic acid comprises SEQ ID NO: 25, or a functional fragment thereof.
[0652] 31. The recombinant AAV vector of any of the preceding paragraphs, wherein the recombinant AAV vector is a chimeric AAV vector, haploid AAV vector, a hybrid AAV vector or polyploid AAV vector.
[0653] 32. The recombinant AAV vector of any of the preceding paragraphs, wherein the recombinant AAV vector is a rational haploid vector, a mosaic AAV vector, a chemically modified AAV vector, or a AAV vector from any AAV serotypes.
[0654] 33. The recombinant AAV vector of any of the preceding paragraphs, wherein the recombinant AAV vector is selected from the group consisting of: a AAVXL32 vector, a AAVXL32.1 vector, a AAV8 vector, or a haploid AAV8 vector comprising at least one AAV8 capsid protein.
[0655] 34. The recombinant AAV vector of any of the preceding paragraphs, wherein the serotype is AAV3b.
[0656] 35. The recombinant AAV vector of any of the preceding paragraphs, wherein the AAV3b serotype comprises one or mutations in a capsid protein selected from any of: 265D, 549A, Q263Y.
[0657] 36. The recombinant AAV vector of any of the preceding paragraphs, wherein the AAV3b serotype is selected from any of: AAV3b265D, AAV3b265D549A, AAV3b549A or AAV3bQ263Y, or AAV3bSASTG.
[0658] 37. The recombinant AAV vector of any of the preceding paragraphs, wherein the poly A sequence is a full length HGF poly A sequence.
[0659] 38. The recombinant AAV vector of any of the preceding paragraphs, wherein poly A sequence is selected from SEQ ID NO: 42, 43 or 44, or a nucleic acid sequence at least 80% sequence identity to SEQ ID NOS: 42-44.
[0660] 39. The recombinant AAV vector of any of the preceding paragraphs, wherein the reverse RNA pol II terminator sequence is SEQ ID NO: 45, or a nucleic acid sequence at least 80% sequence identity to SEQ ID NOS: 45.
[0661] 40. A pharmaceutical composition comprising the recombinant AAV vector of any one of the previous paragraphs in a pharmaceutically acceptable carrier.
[0662] 41. A method to treat a subject with Pompe Disease, or a glycogen storage disease type II (GSD II, Acid Maltase Deficiency) or having a deficiency in alpha-glucosidase (GAA) polypeptide, comprising administering any of the recombinant AAV vector, or the rAAV genome or the nucleic acid sequence of any one of the previous paragraphs to the subject.
[0663] 42. The method of paragraph 38, wherein the AAV vector manufactured from the plasmid of SEQ ID NO: 27.
[0664] 43. The method of any of the preceding paragraphs, where the recombinant AAV vector comprises the nucleic acid sequence of SEQ ID NO: 3, or a functional fragment thereof.
[0665] 44. The method of any of the preceding paragraphs, where the recombinant AAV vector comprises the nucleic acid sequence of SEQ ID NO: 23, or a functional variant thereof.
[0666] 45. The method of any of the preceding paragraphs, wherein GAA polypeptide is secreted from the subject's liver and there is uptake of the secreted GAA by skeletal muscle tissue, cardiac muscle tissue, diaphragm muscle tissue or a combination thereof, wherein uptake of the secreted GAA results in a reduction in lysosomal glycogen stores in the tissue(s).
[0667] 46. The method of any of the preceding paragraphs, wherein the administering to the subject is selected from any of: intramuscular, sub-cutaneous, intraspinal, intracisternal, intrathecal, intravenous administration.
[0668] 47. The method of any of the preceding paragraphs, where the recombinant AAV vector is a chimeric AAV vector, haploid AAV vector, a hybrid AAV vector or polyploid AAV vector.
[0669] 48. The method of any of the preceding paragraphs, where the recombinant AAV vector is a rational haploid vector, a mosaic AAV vector, a chemically modified AAV vector, or a AAV vector from any AAV serotypes.
[0670] 49. The method of any of the preceding paragraphs, where the recombinant AAV vector is a AAVXL32 vector or a AAVXL32.1 vector or a AAV8 vector, or a haploid AAV8 vector comprising at least one AAV8 capsid protein.
[0671] 50. The method of any of the preceding paragraphs, where the recombinant AAV vector is a AAV8 vector.
[0672] 51. The method of any of the preceding paragraphs, where the recombinant AAV vector is administered at a dosage range of between 1.0E11 vg/kg and 5.0E13 vg/kg.
[0673] 52. The method of any of the preceding paragraphs, further comprising receiving GAA protein enzyme replacement therapy, and withdrawing GAA protein enzyme replacement therapy (ERT) on the same day, a day after or, any time between day 1 and 26 weeks after administration of the recombinant AAV vector.
[0674] 53. A nucleic acid construct comprising SEQ ID NO: 3, or a nucleic acid sequence at least 80% sequence identity to SEQ ID NOS: 3.
[0675] 54. The nucleic acid of paragraph 50, wherein the expression of the nucleic acid sequence of SEQ ID NO: 3 or a nucleic acid having 80% sequence identity thereto encodes a GAA polypeptide having at least 80% sequence identity to SEQ ID NO: 1 and wherein there is R at position 199, a H at position 223 and I at position 780.
[0676] 55. A nucleic acid construct comprising SEQ ID NO: 23, or a nucleic acid sequence at least 80% sequence identity to SEQ ID NO: 23.
[0677] 56. The nucleic acid construct of paragraph 52, comprising SEQ ID NO: 3 or SEQ ID NO: 25, or a nucleic acid sequence at least 80% sequence identity to SEQ ID NOS: 3 or 25.
[0678] 57. The nucleic acid of any of the preceding paragraphs, wherein the expression of the nucleic acid sequence of SEQ ID NO: 3 or a nucleic acid having 80% sequence identity thereto encodes a GAA polypeptide having at least 80% sequence identity to SEQ ID NO: 1 and wherein there is R at position 199, a H at position 223 and I at position 780.
[0679] 58. A recombinant AAV comprising the nucleic acid construct of any of the preceding paragraphs.
[0680] 59. The recombinant AAV vector of any of the preceding paragraphs, wherein the AAV lacks at least 1 amino acids of the GAA N terminus.
[0681] 60. The recombinant AAV vector of any of the preceding paragraphs, wherein the AAV lacks at least 5, 10, 15, 20, 25, 30, 35, 40, 45, 50, 55 or more amino acids of the GAA N terminus.
[0682] 61. The recombinant AAV vector of any of the preceding paragraphs, wherein the heterologous signal peptide is inserted immediately after the endogenous GAA signal peptide or a potion thereof.

### EXAMPLES

### Example 1: Generating rAAV Vectors

[0683] The rAAV genomes were packed into capsids to generate rAAV vectors using a rAAV producing cell line. Solely for proof of principal of rAAV vector construction, the capsids used were AAV3b capsids.

[0684] Making rAAV in the rAAV producing cell line: triple transfection technique was used to make rAAV in a suspension rAAV producer cell line, which can be scaled up for making clinical grade vector. Alternatively, different plasmids can be used, e.g., 1) pXX680-ad helper and 2) pXR3 the Rep and Cap 3) and the Transgene plasmid (ITR-transgene-ITR).

[0685] The rAAV genomes generated in Example 1 are used to generate rAVV vectors using a rAAV producing cell line, according to the methods as described in U.S. Pat. No. 9,441,206, which is incorporated herein in its entirety by reference. In particular, rAAV vectors or rAAV virions are produced using a method comprising: (a) providing a rAAV producing cell line an AAV expression system; (b) culturing the cells under conditions in which AAV particles are produced; and (c) optionally isolating the AAV particles. Ratios of triple transfection of the plasmid and transfection cocktail volumes can be optimized, with varying plasmid ratios of XX680, AAV rep/cap helper and TR plasmid to determine the optimal plasmid ratio for rAAV vector production.

[0686] In some instances, the cells are cultured in suspension under conditions in which AAV particles are produced. In another embodiment, the cells are cultured in animal component-free conditions. The animal component-free medium can be any animal component-free medium (e.g., serum-free medium) compatible with the rAAV producer cell line. Examples include, without limitation, SFM4Transfx-293 (Hyclone), Ex-Cell 293 (JRH Biosciences), LC-SFM (Invitrogen), and Pro293-S(Lonza). Conditions sufficient for the replication and packaging of the AAV particles can be, e.g., the presence of AAV sequences sufficient for replication of an rAAV genome described herein and encapsidation into AAV capsids (e.g., AAV rep sequences and AAV cap sequences) and helper sequences from adenovirus and/or herpesvirus.

[0687] Bacterial DNA sequences from the plasmid backbone can be packaged into AAV capsids during manufacturing of the recombinant AAV vectors leading to activations of the innate immune system through its interaction with TLR9 (Akira, 2006; Chadeuf, 2005; Wright, 2014). Various technologies can be used to eliminate plasmid backbone sequences in recombinant AAV preparations, for example minicircles which have limited scalability (Schnodt, 2016). Another method to avoid bacterial DNA sequence in the plasmid backbone is to use closed ended linear duplex DNA, which includes a range of DNA replication technology, including but not limited to doggy bone DNA (dbDNA™) for specifically manufacturing of recombinant AAV vectors. Using closed ended linear duplex DNA, such as dbDNA™ eliminates the bacterial backbone and has been used to produce vaccines and lentivirus (Walters et al, 2014; Scott et al, 2015; Karda et al, 2019) and was shown to be unable to trigger TLR9 responses by DNA vaccine developers.

[0688] Accordingly, in alternative embodiments, generation of rAAV vectors for use in the methods and compositions as disclosed herein can be performed using closed ended linear duplex DNA, including but not limited to Doggybone technology (dbDNA™), as disclosed in US Application 2018/0037943 and Karbowniczek et al., Bioinsights, 2017, which is incorporated herein in its entirety by reference. In brief, a plasmid for AAV production using a closed ended linear duplex DNA technology can comprise the ITRs, promoter and gene of interest, e.g., GAA as disclosed herein, is flanked by a 56 bp palindromic protelomerase recognition sequence. The plasmid is denatured, and in the presence of a Phi29 DNA polymerase, and appropriate primers, Phi29 initiates rolling circle amplification (RCA), creating a double stranded cancatameric repeats of the original construct. When protelomerase is added, binding of the palindromic protelomerase recognition sequences occurs and cleavage-joining reaction occurs to result in a monomeric double stranded (ds) linear covalently closed DNA construct. Addition of common restriction enzymes remove the undesired DNA plasmid backbone sequence and digestion with exonuclease activity, resulting in dbDNA which can be size fractionated to isolate the dbDNA sequence encoding the ITRs, promoter and gene of interest. An exemplary plasmid for generation of rAAV vectors using closed ended linear duplex DNA such as dbDNA™ technology, comprises in the following 5′ to 3′ direction: 5′-protelomerase RS, 5′ITR, LSP promoter, GAA (e.g., wild-type or codon optimized), 3′UTR, hGH poly(A), 3′ ITR, 3′-protelomerase RS (sense strand), where the sense strand is linked to the complementary antisense strand for a stranded (ds) linear covalently closed DNA construct. The use of closed ended linear duplex DNA, e.g., doggy bone DNA (dbDNA™) as a starting material for the manufacturing of an AAV vector for use in the methods and composition as disclosed herein eliminates the bacterial backbone used to propagate the plasmid containing AAV vector with an inability for the product to trigger Toll-like receptor 9 (TLR9) responses. An exemplary dbDNA plasmid for use in the manufacturing of a rAAV vector for use in the methods and compositions as disclosed herein is SEQ ID NO: 37. In some embodiments, the 4780 bp fragment of 347-5126 bp of SEQ ID NO: 37 (i.e., the ITR-to-ITR sequence of SEQ ID NO: 37) can be replaced by any ITR-to-ITR sequence as disclosed herein, e.g., a ITR-to-ITR sequence selected from any of: SEQ ID NO: 23, SEQ ID NO: 24, SEQ ID NO: 31-35 as disclosed herein. Use of closed ended linear duplex DNA technology for manufacturing further reduce the risk for liver enzyme elevations observed at a dose of 1.6E13 vg/kg in patients with Pompe disease.

### Example 2: Comparison of the M3 Construct and Actus 101

[0689] Study Objective: The primary objective of this study presented herein in this example is to evaluate a series of gene therapy vector variants for tissue biodistribution and expression of human acid glucosidase alpha (GAA) in a mouse model of Pompe Disease. The following vectors ACTUS 101 (lot AB20200915), M3 dbp (lot AB20200914) and M3 db (lot AB20201117) were included in this study.

[0690] Background: ACTUS-101 (AAV2/8-LSPhGAA) (SEQ ID NO:451) is an infectious non-replicating recombinant adeno-associated viral vector (AAV) serotype 8, pseudotyped with AAV2 inverted terminal repeats (ITR), expressing human GAA under the control of a liver specific promoter (LSP). The GAA has an amino acid composition that is the same as in the FDA approved Enzyme Replacement Therapy Myozyme/Lumizyme for the treatment of Pompe Disease.

[0691] The Original ACTUS-101 transgene cassette was designed without codon optimization. Several design iterations have been made since the original design and have characterized these in a series of in vivo studies in wild type mice and in GAA knockout (KO) mice.

[0692] An additional change includes the use of synthetic doggy bone DNA (dbDNA™) as a starting material for the manufacturing of the gene therapy vector, eliminating the bacterial backbone and thus minimizing the ability of the product to trigger Toll-like receptor 9 (TLR9) responses.

[0693] The M3 vector (SEQ ID NO: 37) in this study uses the same AAV8 capsid as in ACTUS-101 and is made using the doggy bone precursor plasmid (dbp) for lot AB20200914 and doggy bone DNA (db) for lot AB20201117.

TABLE 5
Study design:

| Mouse strain | GAA −/− mice, JAX strain 004154, B6; 129-Gaa<tm1Rabn>/J |
|---|---|
| Sex | Male |
| Age | 5-7 weeks |
| Mice per vector | N = 5 |
| Doses per vector | 3e10 vg/mouse (LOW); 3e11 vg/mouse dose 2 (HIGH) |
| Injection Volume | 150 ul |
| Route of Administration | tail vein injection |
| Necropsy | 28 days post-injection |
| Number of vectors | 3 |
| Post-harvest analysis | GAA expression in sera, GAA activity in sera, GAA uptake by |
| | target tissues, GAA activity in target tissues, glycogen reduction |
| | in target tissues |

TABLE 6
Treatment groups:

Number of mice

| Group | Vector | 3e10* | 3e11* |
|---|---|---|---|
| 1 | SALINE | 5 | N/A |
| 2 | ACTUS 101 | 5 | 5 |
| 3 | M3 dbp | 5 | 5 |
| 4 | M3 db | 5 | 5 |

*Vector doses in vector genomes/mouse

[0694] Postharvest analysis: GAA expression in sera over time by western blotting and semi-quantitative densitometry; GAA expression in liver by western blotting and semi-quantitative densitometry GAA uptake by select tissues (heart and diaphragm) by western blotting and semi-quantitative densitometry, GAA enzymatic activity in sera over time by 4MU assay; GAA enzymatic activity in liver by 4MU assay; GAA uptake by select tissues (heart, diaphragm and quad) by 4MU assays; glycogen content in select tissues (heart, diaphragm and quad).

### Materials and Methods

[0695] Cloning and vector quantification: All vectors were made using methods as described in Example 1. The constructs were packaged in the AAV8 viral capsid and titered by digital droplet PCR (ddPCR) method using primers directed at vector ITRs.

[0696] Tissue preservation: Fresh tissue and sera specimens were immediately frozen and stored at −80° C. until use for molecular biology analyses.

[0697] Analysis of GAA protein levels in tissues by Western Blot and Densitometry: Tissues were homogenized in T-PER buffer (ThermoFisher 78510) with Halt Protease Inhibitor Cocktail (Thermo 78430) in TissueLyser and protein was quantified by BCA assay. Samples were heated at 95 degrees C. for 5 minutes and 50 μg protein was loaded onto Novex Wedge Well 4-12% Tris/Glycine gel (Invitrogen LC2675), run at 225V for 40 minutes using Tris Glycine Running buffer (ThermoFisher) and transferred onto iBlot2 NC Mini Stacks (Thermo IB23002) using the PO program (20 V 1 min, 23V 4 min, 25V 2 min). Membranes were washed in PBST and stained with Ponceau S stain (Sigma P7170) for 5 minutes followed by washing 3× with distilled water.

[0698] Membranes were imaged on iBright imager (FL15000) using the Ponceau S setting and destained using 0.1M NaOH for 30 sec followed by rinsing the membrane with water for 2-3 minutes. Blocking was done in Superblock (TBS) blocking solution (ThermoFisher 37536) for 1 hour at room temperature. Acid-α-glucosidase (GAA) protein detection was obtained after incubation overnight at 4° C. with a rabbit anti-GAA antibody (AbCam 137068) diluted 1:8000 in PBS 0.05% tween 20, followed by a goat anti-rabbit HRP conjugated antibody (Abcam ab205718) diluted 1:10000. The HRP enzyme activity was detected by Clarity Enhanced Chemiluminescence (ECL) Western Blotting Substrate (BioRad 1705061). The images were acquired by iBright imaging system, densitometry was performed on iBright software v. 4.0.1 and results were expressed as relative calculation (ratio) of the intensity of GAA antibody detected band per total protein by Ponceau S staining. For liver samples, rhGAA was run as a standard curve for absolute quantification.

[0699] Measurement of GAA secretable protein levels in blood by Western Blot (WB) and Densitometry: Fresh blood samples obtained from submandibular bleed were centrifuged and serum collected. 1.5 ul serum was diluted in 18.5 ul T-PER buffer (ThermoFisher 78510) and 20 ul 2× sample buffer (Sigma S3401) and heated at 95 degrees C. for 5 minutes. Samples (40 μl) were run onto Novex Wedge Well 4-12% Tris/Glycine gel (Invitrogen LC2675) at 225V for 40 minutes using Tris Glycine Running buffer (ThermoFisher) and transferred onto iBlot2 NC Mini Stacks (Thermo IB23002) using the PO program (20 V 1 min, 23V 4 min, 25V 2 min). Membranes were washed in PBST and stained with Ponceau S stain (Sigma P7170) for 5 minutes followed by washing 3× with distilled water. Membranes were imaged on iBright imager (FL15000) using the Ponceau S setting and destained using 0.1M NaOH for 30 sec followed by rinsing the membrane with water for 2-3 minutes. Blocking was done in Superblock (TBS) blocking solution (ThermoFisher 37536) for 1 hour at room temperature. Acid-α-glucosidase (GAA) protein detection was obtained after incubation overnight at 4° C. with a rabbit anti-GAA antibody (AbCam 137068) diluted 1:8000 in PBS 0.05% tween 20, followed by a goat anti-rabbit HRP conjugated antibody (Abcam ab205718) diluted 1:10000. The HRP enzyme activity was detected by Clarity Enhanced Chemiluminescence (ECL) Western Blotting Substrate (BioRad 1705061). The images were acquired by the image analyzer iBright imaging system, densitometry was performed on iBright software v. 4.0.1 and results were given by relative calculation (ratio) of the intensity of GAA antibody detected band per total protein by Ponceau S staining.

[0700] GAA activity measurement in tissues: GAA activity was measured on frozen tissues following homogenization and sonication of tissue samples in distilled water. Depending upon the tissue size, 10-50 mg tissue was weighed and homogenized, the homogenates were sonicated at 4 degree c. 3 times for 15 seconds, then centrifuged for 3 min at 15000 RPM. For serum GAA, 10 ul was analyzed, with or without 80 μM acarbose. The reaction was set up with 10 ul of supernatant and 20 ul of substrate-4MUα-D-glucoside, in a 96 wells plate (VWR62402-970). The reaction mixture was incubated at 37 degrees C. for one hour and was stopped by adding 130 ul of Sodium Carbonate buffer pH10.5. A standard curve (0-1000 pmol/ul of 4MU) was used to measure released fluorescent 4MU from individual reaction mixture, using TECAN GENios microplate reader at 465 nm (Emission) and 360 nm (excitation). The protein concentrations of the clarified supernatants were quantified via the Bradford assay (Bio-Rad Laboratories, Cat No. 500-0006). GAA activity was measured in the tissue homogenates by conversion of the artificial substrate 4-methylumbelliferyl (4-MU) α-D-glucoside to the fluorescent product umbelliferone at acidic pH 4.3 as described [1]. To calculate the GAA activity, released 4MU concentration was divided by the sample protein concentration and activity was reported as nmol/hour/mg protein. QA and QC samples were run on the same plate for experimental assay controls.

[0701] GAA activity measurement in serum: Fresh blood samples obtained from submandibular bleed were centrifuged and serum collected. 10 ul of serum was treated 2 ul of 800 μM acarbose. The reaction was set up with 10 ul of supernatant and 20 ul of substrate-4MUα-D-glucoside, in a 96 wells plate (VWR62402-970). The reaction mixture was incubated at 37 degrees C. for one hour and was stopped by adding 130 ul of Sodium Carbonate buffer pH10.5. A standard curve of rhGAA (R&D Systems, Cat. No 8329-GH) Standards, 2,000 ng/mL to 25 ng/mL was used. Released fluorescent 4MU from individual reaction mixture was measured using BioTek FLx800 Reader, Excitation filter=360/40 and Emission filter=460/40. GAA activity was determined by interpolation to the standard curve with a 4-parameter curve fit model and activity was reported as ng/ml.

[0702] Glycogen content: Glycogen content of tissues was measured indirectly as the glucose released after total digestion by amyloglucosidase of the tissue homogenates using the Aspergillus niger assay system and the glucose reagent (Infinity Glucose; TR15421, Thermo Scientific, VA, USA) in a standardized reaction using the Aspergillus niger assay system. The same tissue homogenates used above were used to measure total glycogen content in each tissue. The reaction was set up with 20 ul of supernatant and 55 ul distilled water. Samples were boiled for 3 min and immediately cooled on ice for 10 min. 25 ul of amyloglucosidase (1:50 in 0.1M potassium acetate pH5.5) was added to each reaction tube. A reaction control tube without any amyloglucosidase (homogenate+water) was also set up for each reaction tube. Both sample tube and control sample reaction tubes were incubated at 37 degrees C. for 90 minutes and reaction, was stopped by boiling the tubes for 3 min followed by centrifugation for 3 min at 15000 RPM. The glucose released from each reaction tube was determined by adding 30 ul of supernatant into 1 ml of Infinity glucose reagent (TR15421) and measuring on spectrophotometer at 340 nm (Shimadzu UV-1700).

[0703] Observations: As observed in FIGS. 1A-1D, expression of GAA in cardiac serum was not significantly higher when driven from the M3 construct as compared to Actus 101 over a 4 week period of time. In fact, GAA expression from the M3 construct was reduced at week 4 (FIG. 1D) as compared to week 3 (FIG. 1C), whereas GAA expression from Actus 101 was sustained for at least 4 weeks. Similarly, as observed in FIGS. 2A2-D, the activity of GAA in cardiac serum was not significantly higher from the M3 construct (high or low dose) as compared to Actus 101 over a 4 week period of time. Further, data presented herein showed that the M3 construct was similarly unable to increase GAA levels and activity in target tissues, such as the heart, diaphragm, quadriceps muscle and liver, following administration as compared to Actus 101 (see, e.g., FIGS. 3A-4D).

[0704] Additionally, as shown in FIGS. 5A-5D, a reduction in glycogen did not track in a dose dependent manner in mice following administration of the M3 construct. A significant dose dependent reduction of glycogen reduction was observed in the heart, diaphragm, quadriceps muscle and liver in mice administration Actus 101, however, this trend was not observed following administration of the M3 construct.

[0705] Accordingly, the data presented herein in this Example indicates that the M3 construct fails to perform better than Actus 101 with regards to increasing GAA protein levels and activity that can be sustained over a long period of time (e.g., more than 4 weeks) and that was capable of inducing glycogen clearance in the cell.

[0706] Further, additional variants based on the Actus 101 construct were developed and tested for their ability to promote glycogen clearance in the cell. Such constructs include pP110 and pP113. As shown in FIG. 41, pP110 exhibited a superior ability to promote glycogen clearance from the heart as compared to Actus 101 and pP113—a marked reduction of glyocen levels are observed in the heart following administration of pP110. A greater reduction of glycogen was observed when the pP110 was administered at a dose of 3E11 as compared to an administration of 3E10, confirming that this effect is dosage dependent.

### Example 3: Comparison of the M4 Construct and Actus 101

[0707] Study Objective: The primary objective of this study presented herein in this example is to evaluate a series of gene therapy vector variants for tissue biodistribution and expression of human acid glucosidase alpha (GAA) in a mouse model of Pompe Disease. The following vectors ACTUS 101 (lot AB20210329) and M4 dbp (lot AB20210412) were included in this study.

[0708] Background: ACTUS-101 (AAV2/8-LSPhGAA) is an infectious non-replicating recombinant adeno-associated viral vector (AAV) serotype 8, pseudotyped with AAV2 inverted terminal repeats (ITR), expressing human GAA under the control of a liver specific promoter (LSP). The GAA has an amino acid composition that is the same as in the FDA approved Enzyme Replacement Therapy Myozyme/Lumizyme for the treatment of Pompe Disease

[0709] This study compares Modification 4 (M4) vector to ACTUS-101. The specific elements that were removed include all Cytosine-phosphate-Guanine (CpG) dinucleotides found within the protein coding sequence, and a remnant fragment of the AAV P5 promoter located upstream of the LSP promoter. M4 also includes an RNA polymerase II termination sequence between the poly(A) signal and the 3′ITR to prevent the potential formation of the double stranded RNA.

[0710] An additional change includes the use of synthetic doggy bone DNA (dbDNA™) as a starting material for the manufacturing of the gene therapy vector, eliminating the bacterial backbone and thus minimizing the ability of the product to trigger Toll-like receptor 9 (TLR9) responses.

[0711] The M4 vector in this study uses the same AAV8 capsid as in ACTUS-101 and is made using the doggy bone precursor plasmid (dbp).

TABLE 7
Study design:

| Mouse strain | GAA −/− mice, JAX strain 004154, B6; 129-Gaa<tm1Rabn>/J |
|---|---|
| Sex | Male |
| Age | 7-12 weeks |
| Mice per vector | N = 4-8 |
| Doses per vector | 3e10 vg/mouse Low 3e11 vg/mouse High |
| Injection Volume | 150 ul |
| Route of Administration | tail vein injection |
| Necropsy | 21 days post-injection (3-week sacrifice) and 56 days post- |
| | injection (8-week sacrifice) |
| Number of vectors | 2 |
| Post-harvest analysis | GAA expression in sera, GAA activity in sera, GAA uptake by |
| | target tissues, GAA activity in target tissues, glycogen reduction |
| | in target tissues |

TABLE 8
Treatment groups:

| | | Number of mice |
|---|---|---|
| Group | Vector | 3e11* |
| 1 | SALINE | 4 |
| 2 | ACTUS 101 | 4 |
| 3 | M4 dbp | 4 |
| 4 | M4 dbp | 4 |

*Vector doses in vector genomes/mouse

[0712] Postharvest analysis: GAA expression in sera over time by western blotting and semi-quantitative densitometry; GAA uptake by target organs (heart, diaphragm) by western blotting and semi-quantitative densitometry, GAA enzymatic activity in sera over time by 4MU assay; GAA enzymatic activity in liver by 4MU assay; GAA uptake by select tissues (heart, diaphragm) by 4MU assays; glycogen content in select tissues (heart, diaphragm).

### Materials and Methods

[0713] Cloning and vector quantification: All vectors were made using methods as described in Example 1. The constructs were packaged in the AAV8 viral capsid and titered by digital droplet PCR (ddPCR) method using primers directed at vector ITRs.

[0714] Tissue preservation: Fresh tissue and sera specimens were immediately frozen and stored at −80° C. until use for molecular biology analyses.

[0715] Analysis of GAA protein levels in tissues by Western Blot and Densitometry: Tissues were homogenized in T-PER buffer (ThermoFisher 78510) with Halt Protease Inhibitor Cocktail (Thermo 78430) in TissueLyser and protein was quantified by BCA assay. Samples were diluted in T-PER buffer (ThermoFisher 78510) and 2× sample buffer (Sigma S3401), heated at 95 degrees C. for 5 minutes and 50 μg protein was loaded onto Novex Wedge Well 4-12% Tris/Glycine gel (Invitrogen LC2675), run at 225V for 40 minutes using Tris Glycine Running buffer (ThermoFisher) and transferred onto iBlot2 NC Mini Stacks (Thermo IB23002) using the PO program (20 V 1 min, 23V 4 min, 25V 2 min). Membranes were washed in PBST and stained with Ponceau S stain (Sigma P7170) for 5 minutes followed by washing 3× with distilled water. Membranes were imaged on iBright imager (FL15000) using the Ponceau S setting and destained using 0.1M NaOH for 30 sec followed by rinsing the membrane with water for 2-3 minutes. Blocking was done in Superblock (TBS) blocking solution (ThermoFisher 37536) for 1 hour at room temperature. Acid-α-glucosidase (GAA) protein detection was obtained after incubation overnight at 4° C. with a rabbit anti-GAA antibody (AbCam 137068) diluted 1:8000 in PBS 0.05% tween 20, followed by a goat anti-rabbit HRP conjugated antibody (Abcam ab205718) diluted 1:10000. The HRP enzyme activity was detected by Clarity Enhanced Chemiluminescence (ECL) Western Blotting Substrate (BioRad 1705061). The images were acquired by iBright imaging system, densitometry was performed on iBright software v. 4.0.1 and results were expressed as relative calculation (ratio) of the intensity of GAA antibody detected band per total protein by Ponceau S staining. For liver samples, rhGAA was run as a standard curve for absolute quantification.

[0716] Measurement of GAA secretable protein levels in blood by Western Blot (WB) and Densitometry: Fresh blood samples obtained from submandibular bleed were centrifuged and serum collected. 1.5 ul serum was diluted in 18.5 ul T-PER buffer (ThermoFisher 78510) and 20 ul 2× sample buffer (Sigma S3401) and heated at 95 degrees C. for 5 minutes. Samples (40 μl) were run onto Novex Wedge Well 4-12% Tris/Glycine gel (Invitrogen LC2675) at 225V for 40 minutes using Tris Glycine Running buffer (ThermoFisher) and transferred onto iBlot2 NC Mini Stacks (Thermo IB23002) using the PO program (20 V 1 min, 23V 4 min, 25V 2 min). Membranes were washed in PBST and stained with Ponceau S stain (Sigma P7170) for 5 minutes followed by washing 3× with distilled water. Membranes were imaged on iBright imager (FL15000) using the Ponceau S setting and destained using 0.1M NaOH for 30 sec followed by rinsing the membrane with water for 2-3 minutes. Blocking was done in Superblock (TBS) blocking solution (ThermoFisher 37536) for 1 hour at room temperature. Acid-α-glucosidase (GAA) protein detection was obtained after incubation overnight at 4° C. with a rabbit anti-GAA antibody (AbCam 137068) diluted 1:8000 in PBS 0.05% tween 20, followed by a goat anti-rabbit HRP conjugated antibody (Abcam ab205718) diluted 1:10000. The HRP enzyme activity was detected by Clarity Enhanced Chemiluminescence (ECL) Western Blotting Substrate (BioRad 1705061). The images were acquired by the image analyzer iBright imaging system, densitometry was performed on iBright software v. 4.0.1 and results were given by relative calculation (ratio) of the intensity of GAA antibody detected band per total protein by Ponceau S staining.

[0717] GAA activity measurement in tissues: GAA activity was measured on frozen tissues following homogenization and sonication of tissue samples in distilled water. Depending upon the tissue size, 10-50 mg tissue was weighed and homogenized, the homogenates were sonicated at 4 degree c. 3 times for 15 seconds, then centrifuged for 3 min at 15000 RPM. For serum GAA, 10 ul was analyzed, with or without 80 μM acarbose. The reaction was set up with 10 ul of supernatant and 20 ul of substrate-4MUα-D-glucoside, in a 96 wells plate (VWR62402-970). The reaction mixture was incubated at 37 degrees C. for one hour and was stopped by adding 130 ul of Sodium Carbonate buffer pH10.5. A standard curve (0-1000 pmol/ul of 4MU) was used to measure released fluorescent 4MU from individual reaction mixture, using TECAN GENios microplate reader at 465 nm (Emission) and 360 nm (excitation). The protein concentrations of the clarified supernatants were quantified via the Bradford assay (Bio-Rad Laboratories, Cat No. 500-0006). GAA activity was measured in the tissue homogenates by conversion of the artificial substrate 4-methylumbelliferyl (4-MU) α-D-glucoside to the fluorescent product umbelliferone at acidic pH 4.3 as described [1]. To calculate the GAA activity, released 4MU concentration was divided by the sample protein concentration and activity was reported as nmol/hour/mg protein. QA and QC samples were run on the same plate for experimental assay controls.

[0718] GAA activity measurement in serum: Fresh blood samples obtained from submandibular bleed were centrifuged and serum collected. 10 ul of serum was treated 2 ul of 800 μM acarbose. The reaction was set up with 10 ul of supernatant and 20 ul of substrate-4MUα-D-glucoside, in a 96 wells plate (VWR62402-970). The reaction mixture was incubated at 37 degrees C. for one hour and was stopped by adding 130 ul of Sodium Carbonate buffer pH10.5. A standard curve of rhGAA (R&D Systems, Cat. No 8329-GH) Standards, 2,000 ng/mL to 25 ng/mL was used. Released fluorescent 4MU from individual reaction mixture was measured using BioTek FLx800 Reader, Excitation filter=360/40 and Emission filter=460/40. GAA activity was determined by interpolation to the standard curve with a 4-parameter curve fit model and activity was reported as ng/ml.

[0719] GAA activity measurement in serum-alternative method: GAA, 10 ul was analyzed, with or without 80 μM acarbose. The reaction was set up with 10 ul of supernatant and 20 ul of substrate-4MUα-D-glucoside, in a 96 wells plate (VWR62402-970). The reaction mixture was incubated at 37 degrees C. for one hour and was stopped by adding 130 ul of Sodium Carbonate buffer pH10.5. A standard curve (0-1000 pmol/ul of 4MU) was used to measure released fluorescent 4MU from individual reaction mixture, using TECAN GENios microplate reader at 465 nm (Emission) and 360 nm (excitation). The protein concentrations of the clarified supernatants were quantified via the Bradford assay (Bio-Rad Laboratories, Cat No. 500-0006). GAA activity was measured in the tissue homogenates by conversion of the artificial substrate 4-methylumbelliferyl (4-MU) α-D-glucoside to the fluorescent product umbelliferone at acidic pH 4.3 as described [1]. To calculate the GAA activity, released 4MU concentration was divided by the sample protein concentration and activity was reported as nmol/hour/mg protein. A QA and QC samples were run on the same plate for experimental assay controls.

[0720] Glycogen content: Glycogen content of tissues was measured indirectly as the glucose released after total digestion by amyloglucosidase of the tissue homogenates using the Aspergillus niger assay system and the glucose reagent (Infinity Glucose; TR15421, Thermo Scientific, VA, USA) in a standardized reaction using the Aspergillus niger assay system. The same tissue homogenates used above were used to measure total glycogen content in each tissue. The reaction was set up with 20 ul of supernatant and 55 ul distilled water. Samples were boiled for 3 min and immediately cooled on ice for 10 min. 25 ul of amyloglucosidase (1:50 in 0.1M potassium acetate pH5.5) was added to each reaction tube. A reaction control tube without any amyloglucosidase (homogenate+water) was also set up for each reaction tube. Both sample tube and control sample reaction tubes were incubated at 37 degrees C. for 90 minutes and reaction, was stopped by boiling the tubes for 3 min followed by centrifugation for 3 min at 15000 RPM. The glucose released from each reaction tube was determined by adding 30 ul of supernatant into 1 ml of Infinity glucose reagent (TR15421) and measuring on spectrophotometer at 340 nm (Shimadzu UV-1700).

### Observations:

[0721] Expression of GAA protein levels in serum was markedly higher in mice that were administered the M4 construct as compared to those administered Actus 101. This was observed at 3 weeks and 8 weeks post administration (FIGS. 6A-6C and 10A-10H, respectively). This increased level of GAA protein following administration of M4 translated to a marked increase in GAA activity present in the serum in mice; increased GAA activity was observed at 3 weeks and 8 weeks post administration (FIGS. 7A-7C and 11A-11H, respectively). Similar results were additionally observed in numerous target tissues. Increased GAA protein levels and GAA activity were observed in the heart, diaphragm and liver at 3 weeks post administration and up to 8 weeks post administration (see FIGS. 8A-8C, 12A-12C and 13A-13C, respectively).

[0722] Finally, as shown in FIGS. 14A-14C, a significant dose dependent reduction in glycogen was observed following administration of low and high doses of the M4 construct as compared to Actus 101. This dose dependent reduction was observed in various target tissues, including the heart, diaphragm and liver 8 weeks post administration with either a high or low dose of the M4 construct.

[0723] Accordingly, the data presented herein in this Example indicates that the M4 construct out performs Actus 101 with regards to increasing GAA protein levels and activity that can be sustained over a long period of time (e.g., more than 8 weeks) and that was capable of inducing glycogen clearance in the cell.

### Example 4: Comparison of the Various M4 Constructs

[0724] Numerous M4 constructs having different codon-optimized GAA sequences have been developed and tested for their ability to induce superior levels of GAA protein and activity, as well as their ability to promote glycogen clearance in the cell. Four M4 constructs, i.e., Seg12 (SEQ ID NO: 30), Seq99 (SEQ ID NO: 29), Seq3 (SEQ ID NO:28), and Seq100 (SEQ ID NO: 27), which comprise codon optimized nucleic acid sequences: SEQ ID NO:7 (Seq12), SEQ ID NO:13, (Seq99), SEQ ID NO: 3 (Seq100) and SEQ ID NO: 4 (Seq3), respectively, which encode a GAA polypeptide of SEQ ID NO: 1, were selected for further study, as being identified as being best in class, and data provided herein this example shows the comparison of these constructs.

[0725] All vectors were made at AskBio RTP using proprietary Pro10 cell production system, e.g., as described in U.S. Pat. No. 9,441,206, the contents of which are incorporated herein by reference in its entirety. The constructs were packaged in the AAV8 viral capsid and titered by digital droplet PCR (ddPCR) method using primers directed at vector ITRs.

[0726] All assays and analysis were performed as described herein in Example 2.

[0727] Observations: As shown in FIG. 22, expression of GAA in serum driven from the Seq100 construct was markedly higher at days 7, 14 and 21 post administration as compared to the Actus 101 and the other M4 constructs (i.e., Seq12, Seq99, and Seq3). It was further noted that not all M4 constructs were capable of driving sustainable GAA levels in a similar manner; Seq12, Seq99, Seq3 fail to drive high expression of GAA that was sustained for at least 21 days post administration. Seq100 was additionally found to drive high expression of GAA protein in the liver 21 days post administration, whereas other M4 constructs fail to do so (see FIG. 23). Similarly, increased GAA RNA copy numbers were markedly increased following Seq100 administration as compared to Actus 101 or the other M4 constructs. Accordingly, the data presented herein indicate that Seq100 was a superior M4 construct with regards to driving sustainable, high levels of GAA protein as compared to the other M4 constructs tested.

[0728] To further assess Seq100's capability to drive high levels of GAA protein expression in target tissues, GAA protein levels and activity, as well as glycogen clearance from the cell was assessed. As shown in FIG. 25, GAA protein levels were markedly higher than Actus or other M4 constructs 21 days post administration in the liver, heart and diaphragm. Increased GAA activity levels were similarly observed in the liver, heart and diaphragm in Seq100-administered mice as compared to Actus or other M4 constructs 21 days post administration (see, e.g., FIG. 26A). Finally, a significant reduction of glycogen was observed in the liver, heart and diaphragm in Seq100-administered mice as compared to Actus or other M4 constructs 21 days post administration (see, e.g., FIG. 26B). Accordingly, the data presented herein indicate that Seq100 (comprising codon optimized nucleic acid sequence of SEQ ID NO: 3) was a superior M4 construct with regards to driving sustainable high levels of GAA protein and activity in target tissues (e.g., liver, heart, and diaphragm) as compared to the other M4 constructs tested.

[0729] The data presented herein in this example show that a specific M4 construct, Seq100, was surprisingly, and unexpectedly superior as compared to the other M4 constructs exemplified herein (i.e., Seq12, Seq99, and Seq3). This indicates that the results presented herein were not due to the presence of a codon optimized GAA sequence, but rather, was due to the specific codon optimized sequence included in the Seq100 construct, which is SEQ ID NO: 3.

[0730] Further, as shown herein in FIG. 42, the M4 variants p065 and p072 showed a greater reduction in glyocogen present in the heart as compared to M4 following administration. This result was found to be dosage dependent; a greater reduction in glyocogen in the heart was observed at a dose of 3E11 as compared to 3E10 for both p065 and p072.

### Example 5: Constructs Encoding a GAA-Signal Peptide, a Heterologous Signal Peptide, and a GAA Polypeptide

[0731] Numerous constructs comprising a GAA-signal peptide, or a fragment thereof, a heterologous signal peptide, and a GAA polypeptide were generated. Exemplary constructs generated are described in Table 10 herein. In particular, SEQ ID NO: 463 and 464 are exemplary plasmids (pP112 and pP113, respectively) where pP112, (see, e.g., FIG. 29) is a plasmid comprising in the 5′ to 3′ direction: [ITR]-LSP-[1-27aa GAA-SP]-[201Ip]-[GAA polypeptide starting at amino acid 57 of SEQ ID NO: 1]-[3′UTR]-[hGH polyA]-ITR2, and pP113 (see, e.g., FIG. 29) is a plasmid comprising in a 5′ to 3′ direction: [ITR]-LSP-[1-24aa GAA-SP]-met-[201Ip]-[GAA polypeptide starting at amino acid 57 of SEQ ID NO: 1]-[3′UTR]-[hGH polyA]-ITR2. The nucleic acid encoding the N-terminal truncated GAA polypeptide in pP112 and pP113 can be readily substituted for any nucleic acid sequence encoding a GAA polypeptide, including codon optimized nucleic acid sequences: SEQ ID NO:7 (Seq12), SEQ ID NO:13, (Seq99), SEQ ID NO: 3 (Seq100) and SEQ ID NO: 4 (Seq3), as well as 5′ deletions thereof, such that the nucleic acid sequences encode for a N-terminal truncated GAA polypeptide beginning at amino acid residues selected from any of: 28, 35, 40, 50, 57, 57, 68, 69, 70, 72, 74, 89, 779, 790, 791, 792, 793 or 796. Similarly, the 201Ip (having an amino acid sequence of: MEFGLSWVFLVALLKGVQCE (SEQ ID NO: 60) encoded by nucleic acid sequence SEQ ID NO: 54) is an exemplary heterologous signal peptide included in plasmids pP112 and pP113, and can be readily substituted for other heterologous leader peptide disclosed herein, e.g., any of: wtIL2 lp: MYRMQLLSCIALSLALVTNS (SEQ ID NO: 61) encoded by nucleic acid sequence SEQ ID NO: 55, or mutIL2 lp: MYRMQLLLLIALSLALVTNS (SEQ ID NO: 62) encoded by nucleic acid sequence SEQ ID NO: 56, A2M signal peptide MGKNKLLHPSLVLLLLVLLPTDA (SEQ ID NO: 63) encoded by nucleic acid sequence SEQ ID NO: 57, PZP signal peptide MRKDRLLHLCLVLLLILLSASDSNS (SEQ ID NO: 64) encoded by nucleic acid sequence SEQ ID NO: 58.

[0732] rAAV vectors were generated using the Pro10 cell production system, e.g., as described in U.S. Pat. No. 9,441,206, the contents of which are incorporated herein by reference in its entirety. The constructs were packaged in the AAV8 viral capsid and tittered by digital droplet PCR (ddPCR) method using primers directed at vector ITRs. All assays and analysis were performed as described herein in Example 3.

[0733] Analysis and Observations: pP112 and pP113 were used to generate infectious non-replicating recombinant adeno-associated viral vector (AAV) serotype 8, pseudotyped with AAV2 inverted terminal repeats (ITR), expressing human GAA under the control of a liver specific promoter (LSP), where there is a GAA-signal peptide (or 1-24 amino acid portion of the GAA-signal peptide and a heterologous 201lp signal peptide to promote expression of the GAA polypeptide, and where the GAA polypeptide is a N-terminal truncated protein beginning at amino acid 57 of SEQ ID NO:1.

[0734] Male GAA knock-out mice were injected with the generated AAV via a tail vein injection; 5 male mice were included in each group (i.e., control (saline), pP112, pP113). AAV was administered at a dose of 1×10⁶ in a total volume of 150 ul. Weekly bleeds were performed on the mice for 4 weeks. Each mouse was then sacrificed at 4 weeks, and serum and target tissue was removed for anaylsis.

[0735] Expression of GAA in serum was assessed 4 weeks post administration of rAAV generated from pP112 and pP113 plasmids. After 4 weeks, the animals were sacrificed and tissue was harvested. GAA expression was assessed in sera over time by western blotting (FIG. 30) and semi-quantitative densitometry (FIG. 31). GAA uptake by the liver was also assessed by western blotting (FIG. 35A) and semi-quantitative densitometry (FIG. 35B). GAA enzymatic activity in sera, and heart over time was assessed by 4MU assay (FIGS. 32 and 33). Glycogen content was also assessed in the heart (FIG. 34), as described in Example 3.

[0736] rAAV encoding GAA polypeptide comprising both a N-terminal endogenous GAA signal peptide or a fragment thereof, and a heterologous 201lp signal peptide promoted GAA expression in the serum (FIGS. 30 and 31), and increased GAA activity in the serum and target tissues (e.g., heart) (FIGS. 32 and 33). A reduction of glycogen levels in the heart as compared a rAAV encoding a GAA polypeptide comprising only a N-terminal heterologous signal peptide was also observed (FIG. 34). Finally, a reduction in GAA retention in the liver was noted 4 weeks following administration of the rAAV (FIGS. 35A and 35B).

### Example 6: Constructs Encoding a GAA-Signal Peptide, a Heterologous Signal Peptide, and a GAA Polypeptide

[0737] pP112 and pP113 are used to generate infectious non-replicating recombinant adeno-associated viral vector (AAV) serotype 8, pseudotyped with AAV2 inverted terminal repeats (ITR), expressing human GAA under the control of a liver specific promoter (LSP), where there is a GAA-signal peptide (or 1-24 amino acid portion of the GAA-signal peptide and a heterologous 201lp signal peptide to promote expression of the GAA polypeptide, and where the GAA polypeptide is a N-terminal truncated protein beginning at amino acid 57 of SEQ ID NO:1, as described in Example 5.

[0738] Male GAA knock-out mice are injected with the generated AAV via a tail vein injection; 5 male mice are included in each group (i.e., control (saline), pP112, pP113), as described in Example 5. AAV is administered at a dose of 1×10⁶ in a total volume of 150 ul. Weekly bleeds are performed on the mice for 12 weeks. Each mouse is then sacrificed at 12 weeks, and serum and target tissue is removed for anaylsis.

[0739] Expression of GAA in serum is assessed 12-weeks after administration of rAAV generated from pP112 and pP113 plasmids. After 12 weeks, the animals are sacrificed and tissue harvested, and GAA expression in sera over time by western blotting and semi-quantitative densitometry is assessed, as well as GAA uptake by target organs (heart, diaphragm) by western blotting and semi-quantitative densitometry. GAA enzymatic activity in sera over time is assessed by 4MU assay; and GAA enzymatic activity in liver is assessed by 4MU assay; GAA uptake by select tissues (heart, diaphragm) is assessed by 4MU assays; glycogen content in select tissues (heart, diaphragm) is also assessed, as described in Example 3.

[0740] rAAV encoding GAA polypeptide comprising both a N-terminal endogenous GAA signal peptide or a fragment thereof, and a heterologous 201lp signal peptide promotes GAA expression in the serum, and increases GAA activity in the serum and target tissues (e.g., heart). A reduction of glycogen levels in the heart as compared a rAAV encoding a GAA polypeptide comprising only a N-terminal heterologous signal peptide is also observed. Finally, a reduction in GAA retention in the liver is noted 12 weeks following administration of the rAAV with p113 compared to p112.

### Example 7: Constructs Encoding a GAA-Signal Peptide, a Heterologous Signal Peptide, and a GAA Polypeptide

[0741] Numerous constructs comprising a GAA-signal peptide, or a fragment thereof, a heterologous signal peptide, and a GAA polypeptide, are modified to include an optimized liver-specific promoter. Exemplary constructs that are modified are described in Table 10 herein. For example, the liver-specific promoter (LSP) described in SEQ ID NO: 463 and 464 is swapped with the SP0412 promoter (SEQ ID NO: 91) to enhance the expression of the construct in the liver. For example, such modified exemplary plasmids sequences would include a plasmid comprising in the 5′ to 3′ direction: [ITR]-SP0412-[1-27aa GAA-SP]-[201Ip]-[GAA polypeptide starting at amino acid 57 of SEQ ID NO: 1]-[3′UTR]-[hGH polyA]-ITR2 (i.e., a modified pP112), and a plasmid comprising in a 5′ to 3′ direction: [ITR]-SP0412-[1-24aa GAA-SP]-met-[201Ip]-[GAA polypeptide starting at amino acid 57 of SEQ ID NO: 1]-[3′UTR]-[hGH polyA]-ITR2 (i.e., a modified pP113). The nucleic acid encoding the N-terminal truncated GAA polypeptide in pP112 and pP113 can be readily substituted for any nucleic acid sequence encoding a GAA polypeptide, including codon optimized nucleic acid sequences: SEQ ID NO:7 (Seq12), SEQ ID NO:13, (Seq99), SEQ ID NO: 3 (Seq100) and SEQ ID NO: 4 (Seq3), as well as 5′ deletions thereof, such that the nucleic acid sequences encode for a N-terminal truncated GAA polypeptide beginning at amino acid residues selected from any of: 28, 35, 40, 50, 57, 57, 68, 69, 70, 72, 74, 89, 779, 790, 791, 792, 793 or 796. Similarly, the 201Ip (having an amino acid sequence of: MEFGLSWVFLVALLKGVQCE (SEQ ID NO: 60) encoded by nucleic acid sequence SEQ ID NO: 54) is an exemplary heterologous signal peptide included in plasmids pP112 and pP113, and can be readily substituted for other heterologous leader peptide disclosed herein, e.g., any of: wtIL2 lp: MYRMQLLSCIALSLALVTNS (SEQ ID NO: 61) encoded by nucleic acid sequence SEQ ID NO: 55, or mutIL2 lp: MYRMQLLLLIALSLALVTNS (SEQ ID NO: 62) encoded by nucleic acid sequence SEQ ID NO: 56, A2M signal peptide MGKNKLLHPSLVLLLLVLLPTDA (SEQ ID NO: 63) encoded by nucleic acid sequence SEQ ID NO: 57, PZP signal peptide MRKDRLLHLCLVLLLILLSASDSNS (SEQ ID NO: 64) encoded by nucleic acid sequence SEQ ID NO: 58.

[0742] Modified plasmids described in this Example are used to generate infectious non-replicating recombinant adeno-associated viral vector (AAV) serotype 8, pseudotyped with AAV2 inverted terminal repeats (ITR), expressing human GAA under the control of the SP0412 promoter, where there is a GAA-signal peptide (or 1-24 amino acid portion of the GAA-signal peptide and a heterologous 201lp signal peptide to promote expression of the GAA polypeptide, and where the GAA polypeptide is a N-terminal truncated protein beginning at amino acid 57 of SEQ ID NO:1, as described in Example 5.

[0743] Male GAA knock-out mice are injected with the generated AAV via a tail vein injection as described in Example 5. Expression of GAA in serum is assessed 4 weeks after administration of rAAV generated from modified plasmids. After 4 weeks, the animals are sacrificed and tissue harvested, and GAA expression in sera over time by western blotting and semi-quantitative densitometry is assessed, as well as GAA uptake by target organs (heart, diaphragm) by western blotting and semi-quantitative densitometry. GAA enzymatic activity in sera over time is assessed by 4MU assay; and GAA enzymatic activity in liver is assessed by 4MU assay; GAA uptake by select tissues (heart, diaphragm) is assessed by 4MU assays; glycogen content in select tissues (heart, diaphragm) is also assessed, as described in Example 3.

[0744] rAAV encoding GAA polypeptide comprising both a N-terminal endogenous GAA signal peptide or a fragment thereof, and a heterologous 201lp signal peptide promotes GAA expression in the serum, and increases GAA activity in the serum and target tissues (e.g., heart). A reduction of glycogen levels in the heart as compared a rAAV encoding a GAA polypeptide comprising only a N-terminal heterologous signal peptide is also observed. Finally, a reduction in GAA retention in the liver is noted 4 weeks following administration of the rAAV with modified p113 compared to p112.

### Example 8: Constructs Encoding a 5′UTR with Intron, GAA-Signal Peptide, a Heterologous Signal Peptide, and a GAA Polypeptide

[0745] Numerous constructs comprising a fragment of the GAA-signal peptide, a heterologous signal peptide, and a GAA polypeptide are modified to include a 5′UTR+intron sequence upstream of the GAA sequence. In particular, constructs P072 and P092 (see, e.g., Table 10) are modified to include three changes, generating mod-P072 and mod-P092, respectively.

[0746] First, the 5′UTR of P072 and P092 is replaced with a 5′UTR comprising an intron sequence. Second, the 3′UTR of P072 and P092 is removed. And third, a bi-directional polyA sequence is added immediately following the hGH polyA sequence of P072 and P092. Accordingly, mod-P072 is a construct comprising in the 5′ to 3′ direction: [ITR]-LSP-[5′UTR+intron]-[1-24aa GAA-SP]-[Signal Peptide]-[GAA polypeptide starting at amino acid 57 of SEQ ID NO: 1]-[hGH polyA]-[Bi-directional polyA]-[ITR2]. Mod-P092 is a construct comprising in the 5′ to 3′ direction: [ITR]-LSP-[5′UTR+intron]-[1-27aa GAA-SP]-[Signal Peptide]-[GAA polypeptide starting at amino acid 57 of SEQ ID NO: 1]-[hGH polyA]-[Bi-directional polyA]-[ITR2](FIG. 37)

[0747] Further, the Actus construct is modified to remove residual wtAAV DNA sequences immediately 5′ and 3′ to the ITRs, generating the mod-Actus construct. Such removal of residual wtAAV DNA avoids homologous recombination between the Rep and Cap plasmid used in generating rcAAV. mod-P072 and mod-P092 constructs are also modified to remove the residual wtAAV DNA immediately 5′ and 3′ to the ITRs. (FIG. 37)

[0748] Modified plasmids described in this Example, i.e., mod-Actus, mod-P072 and mod-P092, are used to generate infectious non-replicating recombinant adeno-associated viral vector (AAV) serotype 8, pseudotyped with AAV2 inverted terminal repeats (ITR), expressing human GAA under the control of the LSP promoter, where there is a GAA-signal peptide (or a 1-24 amino acid or a 1-27 amino acid portion of the GAA-signal peptide) and a heterologous signal peptide to promote expression of the GAA polypeptide, and where the GAA polypeptide is a N-terminal truncated protein beginning at amino acid 57 of SEQ ID NO:1, as described in Example 5.

[0749] The generated AAV viruses are used to infect Huh7 cells to assess their efficacy. 6-well culture dishes comprising a population of seeded Huh7 cells are infected at an MOI of 1E⁶ vg/cell. 48 hours post infection, cell lysates and cell supernatants are obtained from the culture. GAA enzymatic activity is measured in the cell lysate (i.e., nmol/hr/mg protein) and supernatant (i.e., nmol/hr/ml). AAV viruses generated from the mod-Actus construct display the highest GAA enzymatic activity in the cell, and AAV viruses generated from the mod-P072 construct yield the highest level of GAA secretion into the supernatant (FIGS. 38A and 38B).

[0750] To assess the efficacy of the AAVs in vivo, male and female wild-type mice (C57BL/6J) are injected with the generated AAV via a tail vein injection. Each virus is administered at a low dose (3E¹⁰), mid-level dose (6E¹⁰), and high dose (3E¹¹) per mouse in a 150 μl total volume. GAA expression levels and activity are assessed in sera weekly for 4 weeks following administration. After 4 weeks, the animals are sacrificed and tissue harvested, and GAA expression in sera over time by western blotting and semi-quantitative densitometry is assessed, as well as GAA uptake by target organs (heart, quadriceps muscle) by western blotting and semi-quantitative densitometry. GAA enzymatic activity in sera over time is assessed by 4MU assay; GAA enzymatic activity in liver is assessed by 4MU assay; and GAA uptake by select tissues (heart, quadriceps muscle) is assessed by 4MU assays.

[0751] Consistent with the in vitro data, rAAVs expressing the 1-24 amino acid portion of the GAA-signal peptide, a 5′UTR+intron, and a bi-directional polyA (i.e., generated by the mod-P072 construct) exhibit the highest level of GAA in the serum of male and female mice (FIG. 39A-39C).

[0752] To assess what tissues express the modified rAAVs described herein in this example, liver, heart, and quadriceps tissue are assessed for GAA levels following administration. rAAVs expressing the full length GAA signal peptide (i.e., generated by the mod-Actus construct) exhibit the highest expression level of GAA in the liver in vivo at a high dose (FIG. 40A), whereas rAAVs expressing the 1-24 amino acid portion of the GAA-signal peptide, a 5′UTR+intron, and a bi-directional polyA (i.e., generated by the mod-P072 construct) exhibits the highest level of GAA uptake in the heart and quadriceps muscle at a high dose (FIGS. 40B and 40C).

[0753] Further mod-Actus AAV exhibits the highest expression level of GAA in the liver at low and mid-level doses, as compared to mod-P072 and mod-P092 AAVs, indicating that GAA is retained in the liver at a higher rate. Mod-P072 AAV exhibits a higher GAA activity in the heart, as compared to mod-Actus and mod-P092, indicating that mod-P072 AAV has a greater uptake in the heart. Mod-Actus and mod-P072 AAVs exhibit a higher GAA activity in the quadriceps muscle as, compared to mod-P092.

### REFERENCES

[0754] Champiat S, Raposo RAS, Maness N J, Lehman J L, Purtell S E, Hasenkrug A M, et al. (2012) Influence of HAART on Alternative Reading Frame Immune Responses over the Course of HIV-1 Infection. PLoS ONE 7(6): e39311. https://doi.org/10.1371/journal.pone.0039311
[0755] Faust S M, Bell P, Cutler B J, et al. CpG-depleted adeno-associated virus vectors evade immune detection. J Clin Invest. 2013; 123(7):2994-3001. doi:10.1172/JCI68205
[0756] Han S O, Ronzitti G, Arnson B, et al. Low-Dose Liver-Targeted Gene Therapy for Pompe Disease Enhances Therapeutic Efficacy of ERT via Immune Tolerance Induction [published correction appears in Mol Ther Methods Clin Dev. 2019 May 1; 13:431]. Mol Ther Methods Clin Dev. 2017; 4:126-136. Published 2017 Jan. 11. doi:10.1016/j.omtm.2016.12.010
[0757] Han S O, Li S, McCall A, et al. Comparisons of Infant and Adult Mice Reveal Age Effects for Liver Depot Gene Therapy in Pompe Disease. Mol Ther Methods Clin Dev. 2019; 17:133-142. Published 2019 Dec. 6. doi:10.1016/j.omtm.2019.11.020
[0758] Kracht, M., van Lummel, M., Nikolic, T. et al. Autoimmunity against a defective ribosomal insulin gene product in type 1 diabetes. Nat Med 23, 501-507 (2017). https://doi.org/10.1038/nm.428
[0759] Krieg A M. CpG motifs in bacterial DNA and their immune effects. Annu Rev Immunol. 2002; 20:709-760. doi:10.1146/annurev.immunol.20.100301.064842
[0760] Lorenz F K, Wilde S, Voigt K, et al. Codon optimization of the human papillomavirus E7 oncogene induces a CD8+T cell response to a cryptic epitope not harbored by wild-type E7. PLoS One. 2015; 10(3):e0121633. Published 2015 Mar. 23. doi:10.1371/journal.pone.0121633
[0761] Schirmbeck R, Riedl P, Fissolo N, Lemonnier F A, Bertoletti A, Reimann J. Translation from cryptic reading frames of DNA vaccines generates an extended repertoire of immunogenic, MHC class I-restricted epitopes. J Immunol. 2005; 174(8):4647-4656. doi:10.4049/jimmunol.174.8.4647
[0762] Tóth R, Mészáros I, Hüser D, et al. Methylation Status of the Adeno-Associated Virus Type 2 (AAV2). Viruses. 2019; 11(1):38. Published 2019 Jan. 9. doi:10.3390/v11010038
[0763] Yewdell J W, Hickman H D. New lane in the information highway: alternative reading frame peptides elicit T cells with potent antiretrovirus activity. J Exp Med. 2007; 204(11):2501-2504. doi:10.1084/jem.20071986
   [0764] Amalfitano, A., et al., 2001. ‘Recombinant human acid alpha-glucosidase enzyme therapy for infantile glycogen storage disease type II: results of a phase I/II clinical trial’, Genet Med, 3: 132-8.
[0765] AmericanThoracicSociety. 1991. ‘Lung function testing: selection of reference values and interpretative strategies. American Thoracic Society’, Am Rev Respir Dis, 144: 1202-18.
[0766] Angelini, C., et al., 2009. ‘Progress in Enzyme Replacement Therapy in Glycogen Storage Disease Type II’, Ther Adv Neurol Disord, 2: 143-53.
[0767] ‘ATS statement: guidelines for the six-minute walk test’. 2002. Am J Respir Crit Care Med, 166: 111-7.
[0768] Banugaria, S. G., et al., 2011. ‘The impact of antibodies on clinical outcomes in diseases treated with therapeutic protein: lessons learned from infantile Pompe disease’, Genet Med, 13: 729-36.
[0769] Brinster, R. L., et al., 1988. ‘Introns increase transcriptional efficiency in transgenic mice’, Proc Natl Acad Sci USA, 85: 836-40.
[0770] Brooke, M. H., et al., 1983. ‘Clinical investigation in Duchenne dystrophy: 2. Determination of the “power” of therapeutic trials based on the natural history’, Muscle Nerve, 6: 91-103.
[0771] Brooke, M. H., et al., 1987. ‘Clinical investigation of Duchenne muscular dystrophy. Interesting results in a trial of prednisone’, Arch Neurol, 44: 812-7.
[0772] Carlier, R. Y., et al., 2011. ‘Whole-body muscle MRI in 20 patients suffering from late onset Pompe disease: Involvement patterns’, Neuromuscul Disord, 21: 791-9.
[0773] Crudele, J. M., et al., 2015. ‘AAV liver expression of FIX-Padua prevents and eradicates FIX inhibitor without increasing thrombogenicity in hemophilia B dogs and mice’, Blood, 125: 1553-61.
[0774] Daya, S., and K. I. Berns. 2008. ‘Gene therapy using adeno-associated virus vectors’, Clin Microbiol Rev, 21: 583-93.
[0775] de Vries, J. M., et al., 2017. ‘Pompe disease in adulthood: effects of antibody formation on enzyme replacement therapy’, Genet Med, 19: 90-97.
[0776] Desnick, R. J. 2004. ‘Enzyme replacement and enhancement therapies for lysosomal diseases’, J Inherit Metab Dis, 27: 385-410.
[0777] Duan, D. 2018. ‘Systemic AAV micro-dystrophin gene therapy for Duchenne Muscular Dystrophy’, Mol Ther, 26: 2337-56.
[0778] El-Gharbawy, A. H., et al., 2011. ‘Expanding the clinical spectrum of late-onset Pompe disease: dilated arteriopathy involving the thoracic aorta, a novel vascular phenotype uncovered’, Mol Genet Metab, 103: 362-6.
[0779] Flotte, T. R., et al., 2004. ‘Phase I trial of intramuscular injection of a recombinant adeno-associated virus alpha 1-antitrypsin (rAAV2-CB-hAAT) gene vector to AAT-deficient adults’, Hum Gene Ther, 15: 93-128.
[0780] Franco, L. M., et al., 2005. ‘Evasion of immune responses to introduced human acid alpha-glucosidase by liver-restricted expression in glycogen storage disease type II’, Mol Ther, 12: 876-84.
[0781] Han, S. O., G et al., 2017. ‘Low-Dose Liver-Targeted Gene Therapy for Pompe Disease Enhances Therapeutic Efficacy of ERT via Immune Tolerance Induction’, Mol Ther Methods Clin Dev, 4: 126-36.
[0782] Hahn, S. H., et al., 2018. ‘Efficacy, safety profile, and immunogenicity of alglucosidase alfa produced at the 4,000-liter scale in U S children and adolescents with Pompe disease: ADVANCE, a phase IV, open-label, prospective study’, Genet Med, 20: 1284-94.
[0783] Hobson-Webb, L. D., et al., 2012. ‘Autopsy findings in late-onset Pompe disease: a case report and systematic review of the literature’, Mol Genet Metab, 106: 462-9.
[0784] Hundsberger T, Rosler K M, and Findling O. 2014. Cessation and resuming of alglucosidase alfa in Pompe disease: a retrospective analysis. J Neurol. September; 261(9):1684-90.
[0785] Ill, C. R., et al., 1997. ‘Optimization of the human factor VIII complementary DNA expression plasmid for gene therapy of hemophilia A’, Blood Coagul Fibrinolysis, 8 Suppl 2: S23-30.
[0786] Kishnani, P. S., et al., 2007. ‘Recombinant human acid [alpha]-glucosidase: major clinical benefits in infantile-onset Pompe disease’, Neurology, 68: 99-109.
[0787] Kishnani, P. S., et al., 2010. ‘Cross-reactive immunologic material status affects treatment outcomes in Pompe disease infants’, Mol Genet Metab, 99: 26-33.
[0788] Koeberl, D. D., et al., 2018. ‘Correction of Biochemical Abnormalities and Improved Muscle Function in a Phase I/II Clinical Trial of Clenbuterol in Pompe Disease’, Mol Ther.
[0789] Lachmann, R., and B. Schoser. 2013. ‘The clinical relevance of outcomes used in late-onset Pompe disease: can we do better?’, Orphanet J Rare Dis, 8: 160.
[0790] “LUMIZYME Prescribing Information.” In. 2014.
[0791] Maga, J. A., et. al., 2013. Glycosylation-independent lysosomal targeting of acid alfa-glucosidase enhances muscle glycogen clearance in pompe mice. J. Biol. Chem. 18 (288): 1428-1438.
[0792] Manno, C. S., et al., 2006. ‘Successful transduction of liver in hemophilia by AAV-Factor IX and limitations imposed by the host immune response’, Nat Med, 12: 342-7.
[0793] Markusic, D. M., et al., 2013. ‘Effective gene therapy for haemophilic mice with pathogenic factor IX antibodies’, EMBO Mol Med, 5: 1698-709.
[0794] Mazaffer, T. 2018. “Updated results from ATB200-02: A first-in-human, open-label, phase ½ study of ATB200 co-administered with AT2221 in adults with Pompe disease.” In 14th annual WORLD symposium.
[0795] Mendell, J. R., et al., 2017. ‘Single-Dose Gene-Replacement Therapy for Spinal Muscular Atrophy’, N Engl J Med, 377: 1713-22.
[0796] Mendell, J. R. et al., 2016. “Gene therapy for spinal muscular atrophy type 1 shows potential to improve survival and motor funtional outcomes.” In ASGCT; 19th Annual Meeting., S190.
[0797] Mendelsohn, N. J., Y. H. Messinger, A. S. Rosenberg, and P. S. Kishnani. 2009. ‘Elimination of antibodies to recombinant enzyme in Pompe's disease’, N Engl J Med, 360: 194-5.
[0798] Moxley, R. T., 3rd. 1990. ‘Functional testing’, Muscle Nerve, 13 Suppl: S26-9.
[0799] Nathwani, A. C., et al., 2014. ‘Long-term safety and efficacy of factor IX gene therapy in hemophilia B’, N Engl J Med, 371: 1994-2004.
[0800] Nathwani, A. C., C et al., 2011. ‘Long-term safety and efficacy following systemic administration of a self-complementary AAV vector encoding human FIX pseudotyped with serotype 5 and 8 capsid proteins’, Mol Ther, 19: 876-85.
[0801] Nathwani, A. C., et al., 2011. ‘Adenovirus-associated virus vector-mediated gene transfer in hemophilia B’, N Engl J Med, 365: 2357-65.
[0802] Niemeyer, G. P., et al., 2009. ‘Long-term correction of inhibitor-prone hemophilia B dogs treated with liver-directed AAV2-mediated factor IX gene therapy’, Blood, 113: 797-806.
[0803] Patel, T. T., S. G. Banugaria, L. E. Case, S. Wenninger, B. Schoser, and P. S. Kishnani. 2012. ‘The impact of antibodies in late-onset Pompe disease: a case series and literature review’, Mol Genet Metab, 106: 301-9.
[0804] Ponder, K. P. 2011. ‘Merry christmas for patients with hemophilia B’, N Engl J Med, 365: 2424-5.
[0805] Raben, N., et al., 2003. ‘Enzyme replacement therapy in the mouse model of Pompe disease’, Mol Genet Metab, 80: 159-69.
[0806] Raj, D., A. M. Davidoff, and A. C. Nathwani. 2011. ‘Self-complementary adeno-associated viral vectors for gene therapy of hemophilia B: progress and challenges’, Expert Rev Hematol, 4: 539-49.
[0807] Rangarajan, S., et al., 2017. ‘AAV5-Factor VIII Gene Transfer in Severe Hemophilia A’, N Engl J Med, 377: 2519-30.
[0808] Russell, D. J., et al., 1989. The gross motor function measure: a means to evaluate the effects of physical therapy. Dev. Med. Child. Neurol 31: 341-352.
[0809] Scheidegger O, et al., 2018. 36-Months follow-up assessment after cessation and resuming of enzyme replacement therapy in late onset Pompe disease: data from the Swiss Pompe Registry. J Neurol. 265 (12):2783-2788. doi: 10.1007/s00415-018-9065-7.
[0810] Schoser, B., A. et al., 2017. ‘Survival and long-term outcomes in late-onset Pompe disease following alglucosidase alfa treatment: a systematic review and meta-analysis’, J Neurol, 264: 621-30.
[0811] Schwarts, C. E., V. E. Powell, and A. Eldar-Lissai. 2017. ‘Measuring hemophilia caregiver burden: validation of the Hemophilia Caregiver Impact measure’, Qual Life Res, 26: 2551-62.
[0812] “Summary of clinical trials using AAV gene transfer.” In. 2015.
[0813] Sun, B., et al., 2007. ‘Enhanced response to enzyme replacement therapy in Pompe disease after the induction of immune tolerance’, Am J Hum Genet, 81: 1042-9.
[0814] Sun, B., et al., 2010. ‘Immunomodulatory gene therapy prevents antibody formation and lethal hypersensitivity reactions in murine pompe disease’, Mol Ther, 18: 353-60.
[0815] Sun, B., et al., 2006. ‘Enhanced efficacy of an AAV vector encoding chimeric, highly secreted acid alpha-glucosidase in glycogen storage disease type II’, Mol Ther, 14: 822-30.
[0816] Tarnopolsky, M., ey al., 2016. ‘Pompe Disease: Diagnosis and Management. Evidence-Based Guidelines from a Canadian Expert Panel’, Can J Neurol Sci, 43: 472-85.
[0817] van Capelle, C. I., N. A. et al., 2012. ‘The quick motor function test: a new tool to rate clinical severity and motor function in Pompe patients’, J Inherit Metab Dis, 35: 317-23.
[0818] van Capelle, C. I., N. A. et al., 2010. ‘Effect of enzyme therapy in juvenile patients with Pompe disease: a three-year open-label study’, Neuromuscul Disord, 20: 775-82.
[0819] van der Beek, N. A., C. I. et al., 2011. ‘Rate of progression and predictive factors for pulmonary outcome in children and adults with Pompe disease’, Mol Genet Metab, 104: 129-36.
[0820] van der Ploeg, A. T., et al., 2010. ‘A randomized study of alglucosidase alfa in late-onset Pompe's disease’, N Engl J Med, 362: 1396-406.
[0821] Vercauteren, K., et al., 2016. ‘Superior in vivo transduction of human hepatocytes using engineered AAV3 capsid.’, Mol Ther, 24: 1042-49.
[0822] Ziegler, R. J., et al., 2008. ‘Ability of adeno-associated virus serotype 8-mediated hepatic expression of acid alpha-glucosidase to correct the biochemical and motor function deficits of presymptomatic and symptomatic Pompe mice’, Hum Gene Ther, 19: 609-21.

[0823] While the present inventions have been described and illustrated in conjunction with a number of specific embodiments, those skilled in the art will appreciate that variations and modifications may be made without departing from the principles of the inventions as herein illustrated, as described and claimed. The present inventions may be embodied in other specific forms without departing from their spirit or essential characteristics. The described embodiments are considered in all respects to be illustrative and not restrictive.

[0824] In closing, regarding the exemplary embodiments of the present invention as shown and described herein, it will be appreciated that a genomic construct, comprising an AAV (adeno-associated virus) viral virion is disclosed and configured for delivery of AAV vectors. Because the principles of the invention may be practiced in a number of configurations beyond those shown and described, it is to be understood that the invention is not in any way limited by the exemplary embodiments, but is generally directed to a genomic construct, comprising an AAV (adeno-associated virus) viral virion apparatus and is able to take numerous forms to do so without departing from the spirit and scope of the invention.

[0825] Certain embodiments of the present invention are described herein, including the best mode known to the inventor(s) for carrying out the invention. Of course, variations on these described embodiments will become apparent to those of ordinary skill in the art upon reading the foregoing description. The inventor(s) expect skilled artisans to employ such variations as appropriate, and the inventor(s) intend for the present invention to be practiced otherwise than specifically described herein. Accordingly, this invention includes all modifications and equivalents of the subject matter recited in the claims appended hereto as permitted by applicable law. Moreover, any combination of the above-described embodiments in all possible variations thereof is encompassed by the invention unless otherwise indicated herein or otherwise clearly contradicted by context.

[0826] Groupings of alternative embodiments, elements, or steps of the present invention are not to be construed as limitations. Each group member may be referred to and claimed individually or in any combination with other group members disclosed herein. It is anticipated that one or more members of a group may be included in, or deleted from, a group for reasons of convenience and/or patentability. When any such inclusion or deletion occurs, the specification is deemed to contain the group as modified thus fulfilling the written description of all Markush groups used in the appended claims.

[0827] Unless otherwise indicated, all numbers expressing a characteristic, item, quantity, parameter, property, term, and so forth used in the present specification and claims are to be understood as being modified in all instances by the term “about.” As used herein, the term “about” means that the characteristic, item, quantity, parameter, property, or term so qualified encompasses a range of plus or minus ten percent above and below the value of the stated characteristic, item, quantity, parameter, property, or term. Accordingly, unless indicated to the contrary, the numerical parameters set forth in the specification and attached claims are approximations that may vary. At the very least, and not as an attempt to limit the application of the doctrine of equivalents to the scope of the claims, each numerical indication should at least be construed in light of the number of reported significant digits and by applying ordinary rounding techniques. Notwithstanding that the numerical ranges and values setting forth the broad scope of the invention are approximations, the numerical ranges and values set forth in the specific examples are reported as precisely as possible. Any numerical range or value, however, inherently contains certain errors necessarily resulting from the standard deviation found in their respective testing measurements. Recitation of numerical ranges of values herein is merely intended to serve as a shorthand method of referring individually to each separate numerical value falling within the range. Unless otherwise indicated herein, each individual value of a numerical range is incorporated into the present specification as if it were individually recited herein. Similarly, as used herein, unless indicated to the contrary, the term “substantially” is a term of degree intended to indicate an approximation of the characteristic, item, quantity, parameter, property, or term so qualified, encompassing a range that can be understood and construed by those of ordinary skill in the art.

[0828] Use of the terms “may” or “can” in reference to an embodiment or aspect of an embodiment also carries with it the alternative meaning of “may not” or “cannot.” As such, if the present specification discloses that an embodiment or an aspect of an embodiment may be or can be included as part of the inventive subject matter, then the negative limitation or exclusionary proviso is also explicitly meant, meaning that an embodiment or an aspect of an embodiment may not be or cannot be included as part of the inventive subject matter. In a similar manner, use of the term “optionally” in reference to an embodiment or aspect of an embodiment means that such embodiment or aspect of the embodiment may be included as part of the inventive subject matter or may not be included as part of the inventive subject matter. Whether such a negative limitation or exclusionary proviso applies will be based on whether the negative limitation or exclusionary proviso is recited in the claimed subject matter.

[0829] When used in the claims, whether as filed or added per amendment, the open-ended transitional term “comprising” (along with equivalent open-ended transitional phrases thereof such as “including,” “containing” and “having”) encompasses all the expressly recited elements, limitations, steps and/or features alone or in combination with un-recited subject matter; the named elements, limitations and/or features are essential, but other unnamed elements, limitations and/or features may be added and still form a construct within the scope of the claim. Specific embodiments disclosed herein may be further limited in the claims using the closed-ended transitional phrases “consisting of” or “consisting essentially of” in lieu of or as an amendment for “comprising.” When used in the claims, whether as filed or added per amendment, the closed-ended transitional phrase “consisting of” excludes any element, limitation, step, or feature not expressly recited in the claims. The closed-ended transitional phrase “consisting essentially of” limits the scope of a claim to the expressly recited elements, limitations, steps and/or features and any other elements, limitations, steps and/or features that do not materially affect the basic and novel characteristic(s) of the claimed subject matter. Thus, the meaning of the open-ended transitional phrase “comprising” is being defined as encompassing all the specifically recited elements, limitations, steps and/or features as well as any optional, additional unspecified ones. The meaning of the closed-ended transitional phrase “consisting of” is being defined as only including those elements, limitations, steps and/or features specifically recited in the claim, whereas the meaning of the closed-ended transitional phrase “consisting essentially of” is being defined as only including those elements, limitations, steps and/or features specifically recited in the claim and those elements, limitations, steps and/or features that do not materially affect the basic and novel characteristic(s) of the claimed subject matter. Therefore, the open-ended transitional phrase “comprising” (along with equivalent open-ended transitional phrases thereof) includes within its meaning, as a limiting case, claimed subject matter specified by the closed-ended transitional phrases “consisting of” or “consisting essentially of” As such, embodiments described herein or so claimed with the phrase “comprising” are expressly or inherently unambiguously described, enabled and supported herein for the phrases “consisting essentially of” and “consisting of.”

[0830] While aspects of the invention have been described with reference to at least one exemplary embodiment, it is to be clearly understood by those skilled in the art that the invention is not limited thereto. Rather, the scope of the invention is to be interpreted only in conjunction with the appended claims and it is made clear, here, that the inventor(s) believe that the claimed subject matter is the invention.

[0831] The references disclosed in the specification and Examples, including but not limited to patents and patent applications, and international patent applications are all incorporated herein in their entirety by reference.

[0832] All patents, patent publications, and other publications referenced and identified in the present specification are individually and expressly incorporated herein by reference in their entirety for the purpose of describing and disclosing, for example, the compositions and methodologies described in such publications that might be used in connection with the present invention. These publications are provided solely for their disclosure prior to the filing date of the present application. Nothing in this regard should be construed as an admission that the inventors are not entitled to antedate such disclosure by virtue of prior invention or for any other reason. All statements as to the date or representation as to the contents of these documents is based on the information available to the applicants and does not constitute any admission as to the correctness of the dates or contents of these documents.

TABLE 9
SEQUENCES

| SEQ | |
|---|---|
| ID | |
| NO: | SEQUENCE |
| 1 | >GAA polypeptide \| ACTUS101 |
| | MGVRHPPCSHRLLAVCALVSLATAALLGHILLHDFLLVPRELSGSSPVLEETHPAHQQGASRPGPRDAQAHPGRPRAVPTQCDVPPNSRFDCAPDKAITQEQCEARGCCYIPAKQGLQGAQMGQPWCFFPPSYPSYKLENLSSSE |
| | MGYTATLTRTTPTFFPKDILTLRLDVMMETENRLHFTIKDPANRRYEVPLETPRVHSRAPSPLYSVEFSEEPFGVIVHRQLDGRVLLNTTVAPLFFADQFLQLSTSLPSQYITGLAEHLSPLMLSTSWTRITLWNRDLAPTPGAN |
| | LYGSHPFYLALEDGGSAHGVFLLNSNAMDVVLQPSPALSWRSTGGILDVYIFLGPEPKSVVQQYLDVVGYPFMPPYWGLGFHLCRWGYSSTAITRQVVENMTRAHFPLDVQWNDLDYMDSRRDFTFNKDGFRDFPAMVQELHQGG |
| | RRYMMIVDPAISSSGPAGSYRPYDEGLRRGVFITNETGQPLIGKVWPGSTAFPDFTNPTALAWWEDMVAEFHDQVPFDGMWIDMNEPSNFIRGSEDGCPNNELENPPYVPGVVGGTLQAATICASSHQFLSTHYNLHNLYGLTEA |
| | IASHRALVKARGTRPFVISRSTFAGHGRYAGHWTGDVWSSWEQLASSVPEILQFNLLGVPLVGADVCGFLGNTSEELCVRWTQLGAFYPFMRNHNSLLSLPQEPYSFSEPAQQAMRKALTLRYALLPHLYTLFHQAHVAGETVAR |
| | PLFLEFPKDSSTWTVDHQLLWGEALLITPVLQAGKAEVTGYFPLGTWYDLQTVPIEALGSLPPPPAAPREPAIHSEGQWVTLPAPLDTINVHLRAGYIIPLQGPGLTTTESRQQPMALAVALTKGGEARGELFWDDGESLEVLER |
| | GAYTQVIFLARNNTIVNELVRVTSEGAGLQLQKVTVLGVATAPQQVLSNGVPVSNFTYSPDTKVLDICVSLLMGEQFLVSWC*. |
| 2 | >ACTUS_101 GAA nucleic acid sequence |
| | ATGGGGGTGAGGCACCCTCCCTGTTCTCACAGGCTGCTGGCTGTGTGTGCTCTGGTGTCTCTGGCCACTGCTGCCCTGCTGGGCCATATCCTGCTGCATGACTTCCTGCTGGTGCCTAGGGAGCTGTCTGGCAGCAGCCCTGTGC |
| | TGGAAGAGACCCACCCTGCTCACCAGCAGGGGGCCAGCAGGCCAGGCCCCAGGGATGCCCAGGCCCACCCTGGCAGACCCAGGGCTGTGCCCACCCAGTGTGATGTGCCTCCCAACAGCAGATTTGACTGTGCCCCTGATAAGGC |
| | CATTACTCAGGAACAGTGTGAGGCCAGGGGCTGCTGCTATATCCCTGCCAAGCAGGGCCTGCAGGGGGCCCAGATGGGGCAGCCCTGGTGCTTCTTCCCCCCCAGCTACCCCTCTTATAAGCTGGAGAATCTGAGCAGCTCTGAA |
| | ATGGGCTACACTGCCACTCTGACCAGGACTACCCCCACCTTCTTCCCCAAGGATATTCTGACTCTGAGGCTGGATGTGATGATGGAGACTGAGAACAGGCTGCACTTCACCATCAAGGACCCTGCCAACAGGAGGTATGAGGTGC |
| | CCCTGGAAACTCCCAGGGTGCACTCTAGGGCCCCCAGCCCCCTGTATTCTGTGGAGTTCTCTGAGGAGCCTTTTGGGGTCATTGTCCACAGGCAGCTGGATGGCAGGGTGCTGCTGAATACTACTGTGGCCCCTCTGTTCTTTGC |
| | TGACCAGTTCCTGCAGCTGAGCACCAGCCTGCCTTCTCAGTACATTACTGGCCTGGCTGAGCATCTGAGCCCCCTGATGCTGAGCACCTCTTGGACCAGAATCACCCTGTGGAACAGGGACCTGGCTCCCACTCCTGGGGCCAAC |
| | CTGTATGGCAGCCACCCCTTCTACCTGGCCCTGGAGGATGGGGGCTCTGCCCATGGGGTGTTCCTGCTGAACAGCAATGCCATGGATGTGGTGCTGCAGCCCTCTCCTGCCCTGTCTTGGAGATCTACTGGGGGCATCCTGGATG |
| | TGTATATCTTCCTGGGGCCTGAGCCCAAGTCTGTGGTGCAGCAGTACCTGGATGTGGTGGGCTACCCCTTCATGCCCCCCTACTGGGGCCTGGGCTTCCACCTGTGCAGGTGGGGCTACTCTTCTACTGCTATCACCAGGCAGGT |
| | GGTGGAGAACATGACCAGGGCTCACTTCCCTCTGGATGTGCAGTGGAATGACCTGGACTACATGGACTCTAGGAGAGACTTCACTTTTAATAAGGATGGGTTCAGGGACTTTCCTGCCATGGTGCAGGAGCTGCATCAGGGGGGC |
| | AGGAGATATATGATGATTGTGGACCCTGCTATTTCTAGCTCTGGCCCTGCTGGCAGCTATAGGCCCTATGATGAGGGGCTGAGGAGGGGGGTGTTCATCACTAATGAGACTGGCCAGCCCCTGATTGGCAAGGTGTGGCCTGGCT |
| | CTACTGCCTTCCCTGATTTCACCAACCCCACTGCCCTGGCCTGGTGGGAGGATATGGTGGCTGAGTTTCATGACCAGGTGCCCTTTGATGGCATGTGGATTGACATGAATGAGCCCAGCAACTTTATCAGGGGCTCTGAAGATGG |
| | CTGCCCCAACAATGAGCTGGAGAACCCCCCCTATGTGCCTGGGGTGGTGGGGGGCACCCTGCAGGCTGCCACCATCTGTGCCAGCAGCCACCAGTTCCTGAGCACCCACTATAACCTGCACAACCTGTATGGCCTGACTGAGGCC |
| | ATTGCCTCTCACAGGGCCCTGGTGAAGGCTAGGGGGACTAGGCCCTTTGTGATCAGCAGGTCTACTTTTGCTGGCCATGGCAGGTATGCTGGGCACTGGACTGGGGATGTGTGGTCTAGCTGGGAGCAGCTGGCCAGCTCTGTGC |
| | CTGAGATCCTGCAGTTTAATCTGCTGGGGGTGCCCCTGGTGGGGGCTGATGTGTGTGGCTTCCTGGGCAATACCTCTGAGGAGCTGTGTGTGAGGTGGACTCAGCTGGGGGCTTTCTACCCCTTCATGAGAAACCACAACTCTCT |
| | GCTGAGCCTGCCCCAGGAGCCCTATTCTTTTTCTGAGCCTGCCCAGCAGGCTATGAGGAAGGCCCTGACTCTGAGGTATGCCCTGCTGCCCCACCTGTATACCCTGTTCCATCAGGCCCATGTGGCTGGGGAGACTGTGGCCAGA |
| | CCTCTGTTCCTGGAGTTCCCCAAGGATAGCTCTACTTGGACTGTGGACCACCAGCTGCTGTGGGGGGAGGCTCTGCTGATCACCCCTGTGCTGCAGGCTGGGAAGGCTGAGGTGACTGGCTATTTCCCCCTGGGCACCTGGTATG |
| | ATCTGCAGACTGTGCCCATTGAGGCCCTGGGCTCTCTGCCCCCTCCCCCTGCTGCCCCCAGGGAGCCTGCCATCCACTCTGAGGGCCAGTGGGTGACCCTGCCTGCCCCTCTGGACACTATCAATGTGCACCTGAGGGCTGGCTA |
| | CATCATCCCCCTGCAGGGCCCTGGCCTGACTACCACTGAGTCTAGGCAGCAGCCCATGGCCCTGGCTGTGGCTCTGACCAAGGGGGGGGAGGCCAGGGGGGAGCTGTTCTGGGATGATGGGGAGTCTCTGGAGGTGCTGGAGAGG |
| | GGGGCCTACACCCAGGTGATCTTCCTGGCTAGGAATAACACCATTGTCAATGAGCTGGTGAGGGTGACCTCTGAGGGGGCTGGCCTGCAGCTGCAGAAGGTGACTGTGCTGGGGGTGGCTACTGCCCCCCAGCAGGTGCTGAGCA |
| | ATGGGGTGCCTGTGAGCAACTTCACCTATAGCCCTGACACCAAGGTGCTGGACATCTGTGTGAGCCTGCTGATGGGGGAGCAGTTCCTGGTGAGCTGGTGCTAA |
| 3 | > coGAA nucleic acid |
| | ATGGGGGTGAGGCACCCTCCCTGTTCTCACAGGCTGCTGGCTGTGTGTGCTCTGGTGTCTCTGGCCACTGCTGCCCTGCTGGGCCATATCCTGCTGCATGACTTCCTGCTGGTGCCTAGGGAGCTGTCTGGCAGCAGCCCTGTGC |
| | TGGAAGAGACCCACCCTGCTCACCAGCAGGGGGCCAGCAGGCCAGGCCCCAGGGATGCCCAGGCCCACCCTGGCAGACCCAGGGCTGTGCCCACCCAGTGTGATGTGCCTCCCAACAGCAGATTTGACTGTGCCCCTGATAAGGC |
| | CATTACTCAGGAACAGTGTGAGGCCAGGGGCTGCTGCTATATCCCTGCCAAGCAGGGCCTGCAGGGGGCCCAGATGGGGCAGCCCTGGTGCTTCTTCCCCCCCAGCTACCCCTCTTATAAGCTGGAGAATCTGAGCAGCTCTGAA |
| | ATGGGCTACACTGCCACTCTGACCAGGACTACCCCCACCTTCTTCCCCAAGGATATTCTGACTCTGAGGCTGGATGTGATGATGGAGACTGAGAACAGGCTGCACTTCACCATCAAGGACCCTGCCAACAGGAGGTATGAGGTGC |
| | CCCTGGAAACTCCCAGGGTGCACTCTAGGGCCCCCAGCCCCCTGTATTCTGTGGAGTTCTCTGAGGAGCCTTTTGGGGTCATTGTCCACAGGCAGCTGGATGGCAGGGTGCTGCTGAATACTACTGTGGCCCCTCTGTTCTTTGC |
| | TGACCAGTTCCTGCAGCTGAGCACCAGCCTGCCTTCTCAGTACATTACTGGCCTGGCTGAGCATCTGAGCCCCCTGATGCTGAGCACCTCTTGGACCAGAATCACCCTGTGGAACAGGGACCTGGCTCCCACTCCTGGGGCCAAC |
| | CTGTATGGCAGCCACCCCTTCTACCTGGCCCTGGAGGATGGGGGCTCTGCCCATGGGGTGTTCCTGCTGAACAGCAATGCCATGGATGTGGTGCTGCAGCCCTCTCCTGCCCTGTCTTGGAGATCTACTGGGGGCATCCTGGATG |
| | TGTATATCTTCCTGGGGCCTGAGCCCAAGTCTGTGGTGCAGCAGTACCTGGATGTGGTGGGCTACCCCTTCATGCCCCCCTACTGGGGCCTGGGCTTCCACCTGTGCAGGTGGGGCTACTCTTCTACTGCTATCACCAGGCAGGT |
| | GGTGGAGAACATGACCAGGGCTCACTTCCCTCTGGATGTGCAGTGGAATGACCTGGACTACATGGACTCTAGGAGAGACTTCACTTTTAATAAGGATGGGTTCAGGGACTTTCCTGCCATGGTGCAGGAGCTGCATCAGGGGGGC |
| | AGGAGATATATGATGATTGTGGACCCTGCTATTTCTAGCTCTGGCCCTGCTGGCAGCTATAGGCCCTATGATGAGGGGCTGAGGAGGGGGGTGTTCATCACTAATGAGACTGGCCAGCCCCTGATTGGCAAGGTGTGGCCTGGCT |
| | CTACTGCCTTCCCTGATTTCACCAACCCCACTGCCCTGGCCTGGTGGGAGGATATGGTGGCTGAGTTTCATGACCAGGTGCCCTTTGATGGCATGTGGATTGACATGAATGAGCCCAGCAACTTTATCAGGGGCTCTGAAGATGG |
| | CTGCCCCAACAATGAGCTGGAGAACCCCCCCTATGTGCCTGGGGTGGTGGGGGGCACCCTGCAGGCTGCCACCATCTGTGCCAGCAGCCACCAGTTCCTGAGCACCCACTATAACCTGCACAACCTGTATGGCCTGACTGAGGCC |
| | ATTGCCTCTCACAGGGCCCTGGTGAAGGCTAGGGGGACTAGGCCCTTTGTGATCAGCAGGTCTACTTTTGCTGGCCATGGCAGGTATGCTGGGCACTGGACTGGGGATGTGTGGTCTAGCTGGGAGCAGCTGGCCAGCTCTGTGC |
| | CTGAGATCCTGCAGTTTAATCTGCTGGGGGTGCCCCTGGTGGGGGCTGATGTGTGTGGCTTCCTGGGCAATACCTCTGAGGAGCTGTGTGTGAGGTGGACTCAGCTGGGGGCTTTCTACCCCTTCATGAGAAACCACAACTCTCT |
| | GCTGAGCCTGCCCCAGGAGCCCTATTCTTTTTCTGAGCCTGCCCAGCAGGCTATGAGGAAGGCCCTGACTCTGAGGTATGCCCTGCTGCCCCACCTGTATACCCTGTTCCATCAGGCCCATGTGGCTGGGGAGACTGTGGCCAGA |
| | CCTCTGTTCCTGGAGTTCCCCAAGGATAGCTCTACTTGGACTGTGGACCACCAGCTGCTGTGGGGGGAGGCTCTGCTGATCACCCCTGTGCTGCAGGCTGGGAAGGCTGAGGTGACTGGCTATTTCCCCCTGGGCACCTGGTATG |
| | ATCTGCAGACTGTGCCCATTGAGGCCCTGGGCTCTCTGCCCCCTCCCCCTGCTGCCCCCAGGGAGCCTGCCATCCACTCTGAGGGCCAGTGGGTGACCCTGCCTGCCCCTCTGGACACTATCAATGTGCACCTGAGGGCTGGCTA |
| | CATCATCCCCCTGCAGGGCCCTGGCCTGACTACCACTGAGTCTAGGCAGCAGCCCATGGCCCTGGCTGTGGCTCTGACCAAGGGGGGGGAGGCCAGGGGGGAGCTGTTCTGGGATGATGGGGAGTCTCTGGAGGTGCTGGAGAGG |
| | GGGGCCTACACCCAGGTGATCTTCCTGGCTAGGAATAACACCATTGTCAATGAGCTGGTGAGGGTGACCTCTGAGGGGGCTGGCCTGCAGCTGCAGAAGGTGACTGTGCTGGGGGTGGCTACTGCCCCCCAGCAGGTGCTGAGCA |
| | ATGGGGTGCCTGTGAGCAACTTCACCTATAGCCCTGACACCAAGGTGCTGGACATCTGTGTGAGCCTGCTGATGGGGGAGCAGTTCCTGGTGAGCTGGTGCTAA |
| 4 | > coGAA GAA nucleic acid |
| | ATGGGAGTGAGACATCCTCCTTGTTCTCATAGACTGCTGGCTGTGTGTGCTCTGGTGTCTCTGGCTACAGCTGCTCTGCTGGGACATATTCTGCTGCATGATTTTCTGCTAGTGCCTAGAGAGCTGTCTGGATCTTCTCCTGTGC |
| | TGGAGGAGACACATCCTGCTCATCAGCAGGGAGCTTCTAGACCTGGACCTAGAGATGCTCAGGCTCATCCTGGAAGACCTAGAGCTGTGCCTACACAGTGTGATGTGCCTCCTAATTCTAGATTTGATTGTGCTCCTGATAAGGC |
| | TATAACACAGGAGCAGTGTGAGGCTAGAGGATGTTGTTATATTCCTGCTAAGCAGGGACTGCAGGGAGCTCAGATGGGACAGCCTTGGTGTTTTTTTCCTCCTTCTTATCCTTCTTATAAGCTGGAGAATCTGTCTTCTTCTGAG |
| | ATGGGATATACAGCTACACTGACAAGAACAACACCTACATTTTTTCCTAAGGATATTCTGACACTGAGACTGGATGTGATGATGGAGACAGAGAATAGACTGCATTTTACAATTAAGGATCCTGCTAATAGAAGATATGAGGTGC |
| | CTCTAGAGACACCTAGAGTGCATTCTAGAGCTCCTTCTCCTCTGTATTCTGTGGAGTTTTCTGAGGAGCCTTTTGGAGTGATTGTGCATAGACAGCTGGATGGAAGAGTGCTGCTGAATACAACAGTGGCTCCTCTGTTTTTTGC |
| | TGATCAGTTTCTGCAGCTGTCTACATCTCTGCCTTCTCAGTATATTACAGGACTGGCTGAGCATCTGTCTCCTCTGATGCTGTCTACATCTTGGACAAGAATTACACTGTGGAATAGAGATCTGGCTCCTACACCTGGAGCTAAT |
| | CTGTATGGATCTCATCCTTTTTATCTGGCTCTGGAGGATGGAGGATCTGCTCATGGAGTGTTTCTGCTGAATTCTAATGCTATGGATGTAGTGCTGCAGCCTTCTCCTGCTCTGTCTTGGAGATCTACAGGAGGAATTCTGGATG |
| | TGTATATTTTTCTAGGACCTGAGCCTAAGTCTGTGGTGCAGCAGTATCTGGATGTAGTGGGATATCCTTTTATGCCTCCTTATTGGGGACTGGGATTTCATCTGTGTAGATGGGGATATTCTTCTACAGCTATTACAAGACAGGT |
| | GGTTGAGAATATGACAAGAGCTCATTTTCCTCTGGATGTGCAGTGGAATGATCTAGATTATATGGATTCTAGAAGAGATTTTACATTTAATAAGGATGGATTTAGAGATTTTCCTGCTATGGTGCAGGAGCTGCATCAGGGAGGA |
| | AGAAGATATATGATGATTGTGGATCCTGCTATTTCTTCTTCTGGACCTGCTGGATCTTATAGACCTTATGATGAGGGACTGAGAAGAGGAGTGTTTATTACAAATGAGACAGGACAGCCTCTGATTGGAAAGGTGTGGCCTGGAT |
| | CTACAGCTTTTCCTGATTTTACAAATCCTACAGCTCTGGCTTGGTGGGAGGATATGGTGGCTGAGTTTCATGATCAGGTGCCTTTTGATGGAATGTGGATTGATATGAATGAGCCTTCTAATTTTATAAGAGGATCTGAGGATGG |
| | ATGTCCTAATAATGAGCTAGAGAATCCTCCTTATGTGCCTGGAGTAGTGGGAGGAACACTGCAGGCTGCTACAATTTGTGCTTCTTCTCATCAGTTTCTGTCTACACATTATAATCTGCATAATCTGTATGGACTGACAGAGGCT |
| | ATTGCTTCTCATAGAGCTCTGGTGAAGGCTAGAGGAACAAGACCTTTTGTGATTTCTAGATCTACATTTGCTGGACATGGAAGATATGCTGGACATTGGACAGGAGATGTATGGTCTTCTTGGGAGCAGCTAGCTTCTTCTGTGC |
| | CTGAGATTCTGCAGTTTAATCTGCTAGGAGTGCCTCTGGTGGGAGCTGATGTGTGTGGATTTCTGGGAAATACATCTGAGGAGCTGTGTGTGAGATGGACACAGCTGGGAGCTTTTTATCCTTTTATGAGAAATCATAATTCTCT |
| | GCTGTCTCTGCCTCAGGAGCCTTATTCTTTTTCTGAGCCTGCTCAGCAGGCTATGAGAAAGGCTCTGACACTGAGATATGCTCTGCTGCCTCATCTGTATACACTGTTTCATCAGGCTCATGTGGCTGGAGAGACAGTAGCTAGA |
| | CCTCTGTTTCTGGAGTTTCCTAAGGATTCTTCTACATGGACAGTTGATCATCAGCTGCTGTGGGGAGAGGCTCTGCTGATTACACCTGTGCTGCAGGCTGGAAAGGCTGAGGTGACAGGATATTTTCCTCTGGGAACATGGTATG |
| | ATCTGCAGACAGTGCCTATAGAGGCTCTGGGATCTCTGCCTCCTCCTCCTGCTGCTCCTAGAGAGCCTGCTATTCATTCTGAGGGACAGTGGGTGACACTGCCTGCTCCTCTGGATACAATTAATGTGCATCTGAGAGCTGGATA |
| | TATTATTCCTCTGCAGGGACCTGGACTGACAACAACAGAGTCTAGACAGCAGCCTATGGCTCTGGCTGTGGCTCTGACAAAGGGAGGAGAGGCTAGAGGAGAGCTGTTTTGGGATGATGGAGAGTCTCTGGAGGTGCTGGAGAGA |
| | GGAGCTTATACACAGGTGATTTTTCTGGCTAGAAATAATACAATTGTGAATGAGCTGGTGAGAGTGACATCTGAGGGAGCTGGACTGCAGCTGCAGAAGGTGACAGTGCTGGGAGTGGCTACAGCTCCTCAGCAGGTGCTGTCTA |
| | ATGGAGTGCCTGTGTCTAATTTTACATATTCTCCTGATACAAAGGTGCTGGATATTTGTGTGTCTCTGCTGATGGGAGAGCAGTTTCTGGTGTCTTGGTGT |
| 5 | > coGAA GAA nucleic acid |
| | ATGGGGGTGAGACACCCCCCTTGCTCTCACAGGCTGCTGGCTGTGTGTGCCCTGGTGAGCCTGGCCACTGCTGCTCTGCTGGGCCACATCCTGCTGCATGACTTCCTGCTGGTGCCAAGAGAGCTGTCTGGGAGCAGCCCTGTGC |
| | TGGAGGAGACCCACCCTGCCCATCAGCAGGGGGCCAGCAGGCCAGGCCCTAGGGATGCTCAGGCTCACCCAGGGAGGCCTAGGGCTGTGCCCACCCAGTGTGATGTGCCCCCTAACAGCAGGTTTGACTGTGCTCCAGACAAGGC |
| | CATCACCCAGGAGCAGTGTGAGGCCAGAGGCTGCTGCTACATTCCTGCTAAGCAGGGCCTGCAGGGGGCTCAGATGGGCCAGCCCTGGTGCTTTTTCCCCCCTAGCTACCCTAGCTACAAGCTGGAGAACCTGAGCAGCTCTGAG |
| | ATGGGGTATACTGCCACTCTGACCAGGACCACCCCCACCTTCTTTCCCAAGGATATTCTGACCCTGAGGCTGGATGTGATGATGGAGACTGAGAACAGGCTGCACTTCACCATCAAGGATCCTGCCAACAGGAGGTATGAGGTGC |
| | CTCTGGAAACCCCCAGGGTCCACAGCAGGGCCCCTAGCCCTCTGTACTCTGTGGAGTTCTCTGAGGAGCCCTTTGGGGTGATTGTGCATAGGCAGCTGGATGGCAGGGTGCTGCTGAATACCACTGTGGCCCCCCTGTTCTTTGC |
| | TGACCAGTTCCTGCAGCTGAGCACCTCTCTGCCCTCTCAGTACATCACTGGCCTGGCTGAGCACCTGAGCCCTCTGATGCTGAGCACCTCTTGGACCAGGATCACCCTGTGGAATAGGGATCTGGCCCCTACCCCTGGGGCCAAC |
| | CTGTATGGGAGCCACCCTTTCTACCTGGCCCTGGAGGATGGGGGGTCTGCCCATGGGGTGTTCCTGCTGAACAGCAATGCCATGGATGTGGTGCTGCAGCCCAGCCCTGCCCTGTCTTGGAGGTCTACTGGGGGCATCCTGGATG |
| | TGTATATCTTCCTGGGCCCTGAGCCCAAGTCTGTGGTGCAGCAGTACCTGGATGTGGTGGGCTACCCCTTCATGCCCCCCTACTGGGGCCTGGGCTTCCACCTGTGCAGGTGGGGCTACAGCAGCACTGCCATCACCAGGCAGGT |
| | GGTGGAGAACATGACTAGGGCCCACTTCCCCCTGGATGTGCAGTGGAATGACCTGGACTACATGGACTCTAGGAGGGATTTCACCTTTAACAAGGATGGGTTTAGGGACTTCCCTGCTATGGTGCAGGAGCTGCATCAGGGGGGC |
| | AGGAGGTATATGATGATTGTGGACCCTGCCATCTCTAGCTCTGGGCCTGCTGGCAGCTACAGGCCCTATGATGAGGGCCTGAGGAGGGGGGTGTTCATCACTAATGAAACTGGCCAGCCCCTGATTGGGAAGGTGTGGCCTGGCT |
| | CTACTGCTTTCCCTGACTTCACCAACCCCACTGCCCTGGCCTGGTGGGAGGACATGGTGGCTGAGTTCCATGATCAGGTGCCCTTTGATGGCATGTGGATTGACATGAATGAGCCTAGCAACTTCATTAGGGGCTCTGAGGATGG |
| | CTGCCCCAACAATGAGCTGGAGAACCCCCCCTATGTGCCTGGGGTGGTGGGGGGGACTCTGCAGGCTGCCACTATTTGTGCTTCTTCTCACCAGTTTCTGAGCACCCACTATAACCTGCATAACCTGTATGGGCTGACTGAGGCT |
| | ATTGCCAGCCACAGGGCCCTGGTGAAGGCCAGGGGCACTAGGCCTTTTGTGATCTCTAGGAGCACCTTTGCTGGCCATGGCAGGTATGCTGGCCATTGGACTGGGGATGTGTGGAGCAGCTGGGAGCAGCTGGCCAGCTCTGTCC |
| | CTGAGATCCTGCAGTTTAATCTGCTGGGGGTGCCCCTGGTGGGGGCTGATGTGTGTGGCTTCCTGGGCAACACCTCTGAAGAGCTGTGTGTGAGGTGGACCCAGCTGGGGGCCTTCTACCCCTTCATGAGGAACCACAATAGCCT |
| | GCTGAGCCTGCCCCAGGAGCCCTACAGCTTTTCTGAGCCAGCCCAGCAGGCCATGAGGAAGGCCCTGACCCTGAGGTATGCCCTGCTGCCTCACCTGTACACCCTGTTCCACCAGGCCCATGTGGCTGGGGAGACTGTGGCCAGG |
| | CCCCTGTTCCTGGAGTTTCCCAAAGATAGCAGCACCTGGACTGTGGACCACCAGCTGCTGTGGGGGGAGGCCCTGCTGATCACCCCAGTGCTGCAGGCTGGGAAGGCTGAGGTGACTGGGTACTTCCCCCTGGGCACCTGGTATG |
| | ACCTGCAGACTGTGCCTATTGAGGCTCTGGGCAGCCTGCCCCCTCCCCCTGCTGCCCCCAGAGAGCCTGCCATCCATTCTGAGGGGCAGTGGGTGACTCTGCCTGCCCCCCTGGACACCATCAATGTGCACCTGAGAGCTGGGTA |
| | TATCATCCCCCTGCAGGGCCCTGGGCTGACCACTACTGAGTCTAGGCAGCAGCCCATGGCTCTGGCTGTGGCCCTGACTAAGGGGGGGGAGGCTAGGGGGGAGCTGTTCTGGGATGATGGGGAGTCTCTGGAGGTGCTGGAGAGG |
| | GGGGCCTACACCCAGGTGATCTTCCTGGCTAGGAACAACACCATTGTGAATGAGCTGGTGAGGGTGACTTCTGAGGGGGCTGGCCTGCAGCTGCAGAAGGTGACTGTGCTGGGGGTGGCCACTGCCCCCCAGCAGGTCCTGAGCA |
| | ATGGGGTGCCTGTGAGCAACTTCACCTACTCTCCTGACACCAAGGTGCTGGACATCTGTGTGAGCCTGCTGATGGGGGAGCAGTTCCTGGTGAGCTGGTGCTGA |
| 6 | > coGAA GAA nucleic acid |
| | ATGGGGGTGAGGCACCCCCCCTGTTCTCACAGGCTGCTGGCTGTGTGTGCCCTGGTGAGCCTGGCTACTGCTGCCCTGCTGGGCCACATCCTGCTGCATGACTTCCTGCTGGTGCCCAGGGAGCTGTCTGGCTCTAGCCCAGTGC |
| | TGGAGGAAACCCATCCTGCCCACCAGCAGGGGGCCAGCAGGCCTGGCCCTAGGGATGCCCAGGCTCATCCTGGGAGGCCCAGGGCTGTGCCCACCCAGTGTGATGTGCCTCCCAACTCTAGATTTGACTGTGCCCCTGACAAGGC |
| | CATCACTCAGGAGCAGTGTGAGGCCAGGGGGTGCTGCTACATCCCTGCCAAGCAGGGGCTGCAGGGGGCCCAGATGGGCCAGCCTTGGTGCTTCTTCCCTCCCAGCTACCCCTCTTACAAGCTGGAGAACCTGAGCAGCTCTGAG |
| | ATGGGGTACACTGCTACCCTGACTAGGACCACCCCCACCTTCTTCCCTAAGGATATCCTGACCCTGAGACTGGATGTGATGATGGAGACTGAGAACAGGCTGCACTTCACTATTAAGGACCCTGCTAACAGGAGGTATGAGGTGC |
| | CCCTGGAGACCCCCAGGGTGCACAGCAGGGCCCCCAGCCCCCTGTACTCTGTGGAGTTCTCTGAGGAGCCCTTTGGGGTGATTGTGCACAGGCAGCTGGATGGCAGAGTGCTGCTGAACACCACTGTGGCTCCTCTGTTCTTTGC |
| | TGACCAGTTCCTGCAGCTGAGCACTAGCCTGCCCAGCCAGTACATCACTGGGCTGGCTGAGCACCTGTCTCCTCTGATGCTGAGCACTAGCTGGACTAGGATCACCCTGTGGAACAGGGACCTGGCCCCCACTCCTGGGGCTAAT |
| | CTGTATGGCAGCCACCCTTTTTACCTGGCCCTGGAGGATGGGGGGTCTGCCCATGGGGTGTTCCTGCTGAACTCTAATGCCATGGATGTGGTGCTGCAGCCCTCTCCTGCCCTGAGCTGGAGGAGCACTGGGGGCATCCTGGATG |
| | TGTACATCTTCCTGGGCCCTGAGCCCAAGTCTGTGGTGCAGCAGTATCTGGATGTGGTGGGCTATCCCTTTATGCCCCCCTATTGGGGCCTGGGGTTTCACCTGTGCAGGTGGGGGTATTCTTCTACTGCCATCACCAGGCAGGT |
| | GGTGGAGAACATGACCAGGGCCCACTTCCCCCTGGATGTGCAGTGGAATGACCTGGACTATATGGACAGCAGGAGGGACTTCACTTTCAACAAGGATGGGTTCAGGGACTTCCCTGCTATGGTGCAGGAGCTGCACCAGGGGGGG |
| | AGGAGGTACATGATGATTGTGGATCCTGCCATCTCTAGCTCTGGCCCTGCTGGCAGCTACAGGCCATATGATGAGGGCCTGAGGAGGGGGGTGTTCATCACCAATGAGACTGGGCAGCCTCTGATTGGCAAGGTGTGGCCTGGCA |
| | GCACTGCTTTCCCTGATTTCACCAACCCCACTGCTCTGGCCTGGTGGGAGGACATGGTGGCTGAGTTTCATGATCAGGTGCCTTTTGATGGGATGTGGATTGATATGAATGAGCCTAGCAACTTCATCAGAGGCTCTGAGGATGG |
| | CTGTCCCAATAATGAGCTGGAGAACCCCCCCTATGTGCCTGGGGTGGTGGGGGGCACCCTGCAGGCTGCTACCATCTGTGCTAGCTCTCATCAGTTCCTGAGCACTCACTACAACCTGCACAACCTGTATGGGCTGACTGAGGCT |
| | ATTGCCAGCCATAGGGCCCTGGTGAAGGCCAGAGGCACCAGGCCCTTTGTGATCAGCAGGAGCACCTTTGCTGGCCATGGCAGGTATGCTGGCCACTGGACTGGGGATGTGTGGAGCAGCTGGGAGCAGCTGGCCTCTTCTGTGC |
| | CTGAGATCCTGCAGTTCAACCTGCTGGGGGTGCCCCTGGTGGGGGCTGATGTGTGTGGCTTCCTGGGCAACACCTCTGAGGAGCTGTGTGTGAGGTGGACTCAGCTGGGGGCTTTTTATCCCTTCATGAGGAACCACAATAGCCT |
| | GCTGTCTCTGCCCCAGGAGCCCTATTCTTTCTCTGAGCCTGCCCAGCAGGCCATGAGGAAGGCCCTGACTCTGAGGTATGCCCTGCTGCCCCACCTGTACACCCTGTTCCACCAGGCCCATGTGGCTGGGGAGACTGTGGCCAGG |
| | CCCCTGTTTCTGGAGTTCCCTAAGGACAGCTCTACCTGGACTGTGGATCACCAGCTGCTGTGGGGGGAGGCCCTGCTGATCACTCCAGTCCTGCAGGCTGGCAAAGCTGAGGTGACTGGCTACTTCCCCCTGGGCACCTGGTATG |
| | ACCTGCAGACTGTGCCCATTGAGGCTCTGGGCAGCCTGCCCCCCCCCCCTGCTGCTCCTAGGGAGCCTGCCATTCACTCTGAGGGCCAGTGGGTGACTCTGCCTGCTCCCCTGGATACCATCAATGTGCATCTGAGGGCTGGCTA |
| | CATCATCCCCCTGCAGGGGCCTGGCCTGACCACCACTGAGAGCAGGCAGCAGCCCATGGCCCTGGCTGTGGCCCTGACTAAGGGGGGGGAGGCTAGGGGGGAGCTGTTCTGGGATGATGGGGAGTCTCTGGAAGTGCTGGAGAGG |
| | GGGGCTTACACCCAGGTGATTTTCCTGGCCAGGAACAACACTATTGTGAATGAGCTGGTGAGGGTGACCTCTGAGGGGGCTGGCCTGCAGCTGCAGAAGGTGACTGTGCTGGGGGTGGCCACTGCCCCCCAGCAGGTGCTGAGCA |
| | ATGGGGTGCCTGTGAGCAACTTTACCTACTCCCCTGATACCAAGGTGCTGGACATCTGTGTGTCTCTGCTGATGGGGGAACAGTTTCTGGTGTCTTGGTGCTGA |
| 7 | > coGAA GAA nucleic acid |
| | ATGGGGGTGAGGCACCCCCCCTGCTCTCACAGGCTGCTGGCTGTGTGTGCCCTGGTGAGCCTGGCCACTGCTGCTCTGCTGGGGCACATCCTGCTGCATGACTTCCTGCTGGTGCCCAGGGAGCTGTCTGGCAGCTCTCCTGTGC |
| | TGGAGGAAACTCATCCTGCCCATCAGCAGGGGGCCTCTAGGCCAGGCCCCAGGGATGCCCAGGCCCATCCTGGCAGGCCCAGAGCTGTGCCCACCCAGTGTGATGTGCCCCCCAACAGCAGGTTTGATTGTGCCCCTGATAAGGC |
| | CATCACCCAGGAGCAGTGTGAGGCCAGGGGCTGCTGCTACATCCCTGCCAAGCAGGGGCTGCAGGGGGCCCAGATGGGCCAGCCCTGGTGCTTCTTCCCCCCTTCTTACCCCAGCTACAAGCTGGAGAACCTGTCTTCTTCTGAG |
| | ATGGGCTATACTGCCACCCTGACCAGGACCACTCCCACCTTCTTCCCCAAGGACATCCTGACTCTGAGACTGGATGTGATGATGGAGACTGAGAACAGGCTGCACTTCACCATCAAGGACCCTGCCAACAGGAGGTATGAGGTGC |
| | CTCTGGAGACTCCTAGAGTGCACAGCAGGGCTCCCTCTCCCCTGTACTCTGTGGAGTTCTCTGAGGAGCCCTTTGGGGTGATTGTGCACAGACAGCTGGATGGGAGGGTGCTGCTGAACACCACTGTGGCCCCCCTGTTCTTTGC |
| | TGACCAGTTCCTGCAGCTGTCTACCTCTCTGCCCAGCCAGTACATTACTGGGCTGGCTGAACATCTGTCTCCCCTGATGCTGAGCACCAGCTGGACCAGGATCACTCTGTGGAACAGGGACCTGGCCCCCACTCCTGGGGCCAAT |
| | CTGTATGGGAGCCACCCATTCTACCTGGCCCTGGAGGATGGGGGCTCTGCCCATGGGGTGTTCCTGCTGAACAGCAATGCCATGGATGTGGTGCTGCAGCCTTCCCCTGCCCTGAGCTGGAGGTCTACTGGGGGCATCCTGGATG |
| | TGTACATTTTCCTGGGCCCTGAGCCCAAGTCTGTGGTGCAGCAGTACCTGGATGTGGTGGGGTACCCTTTCATGCCTCCCTACTGGGGCCTGGGCTTTCACCTGTGCAGGTGGGGCTATTCTAGCACTGCCATCACCAGGCAGGT |
| | GGTGGAGAACATGACTAGGGCTCATTTCCCCCTGGATGTGCAGTGGAATGATCTGGATTATATGGACTCTAGGAGGGACTTTACTTTCAATAAGGATGGCTTCAGGGATTTTCCTGCTATGGTGCAGGAGCTGCACCAGGGGGGC |
| | AGGAGGTATATGATGATTGTGGATCCTGCCATCTCTAGCTCTGGGCCTGCTGGCTCTTACAGGCCCTATGATGAGGGGCTGAGGAGGGGGGTGTTTATTACTAATGAGACTGGCCAGCCTCTGATTGGGAAGGTGTGGCCTGGCA |
| | GCACTGCCTTCCCAGACTTCACCAACCCCACTGCCCTGGCCTGGTGGGAGGACATGGTGGCTGAGTTCCATGACCAGGTGCCCTTTGATGGGATGTGGATTGATATGAATGAGCCCTCTAACTTCATTAGGGGCTCTGAGGATGG |
| | CTGCCCCAACAATGAGCTGGAGAACCCCCCATATGTGCCTGGGGTGGTGGGGGGGACCCTGCAGGCTGCTACCATCTGTGCTAGCTCTCACCAGTTCCTGAGCACCCACTACAACCTGCACAATCTGTATGGCCTGACTGAGGCC |
| | ATTGCCAGCCATAGGGCCCTGGTGAAGGCCAGGGGGACCAGACCCTTTGTGATCTCCAGGAGCACCTTTGCTGGCCATGGGAGATATGCTGGCCATTGGACTGGGGATGTGTGGTCTAGCTGGGAGCAGCTGGCCAGCTCTGTGC |
| | CTGAGATCCTGCAGTTCAATCTGCTGGGGGTGCCTCTGGTGGGGGCTGATGTGTGTGGCTTCCTGGGCAACACCTCTGAAGAACTGTGTGTGAGATGGACCCAGCTGGGGGCCTTCTACCCCTTCATGAGGAACCACAACAGCCT |
| | GCTGTCTCTGCCCCAGGAGCCTTACTCTTTTTCTGAGCCTGCCCAGCAGGCCATGAGGAAGGCCCTGACCCTGAGATATGCCCTGCTGCCTCACCTGTACACCCTGTTCCACCAGGCCCATGTGGCTGGGGAGACTGTGGCCAGG |
| | CCCCTGTTCCTGGAGTTCCCCAAGGACAGCAGCACCTGGACTGTGGACCACCAGCTGCTGTGGGGGGAGGCCCTGCTGATCACCCCTGTGCTGCAGGCTGGGAAGGCTGAGGTGACTGGCTACTTCCCCCTGGGCACCTGGTATG |
| | ATCTGCAGACTGTGCCCATTGAGGCCCTGGGGTCTCTGCCCCCCCCCCCTGCTGCTCCCAGAGAGCCTGCCATCCATTCTGAGGGCCAGTGGGTGACCCTGCCTGCCCCCCTGGACACCATTAATGTGCACCTGAGGGCTGGCTA |
| | CATTATCCCCCTGCAGGGCCCTGGCCTGACCACCACTGAGAGCAGGCAGCAGCCTATGGCTCTGGCTGTGGCCCTGACCAAGGGGGGGGAGGCCAGGGGGGAGCTGTTTTGGGATGATGGGGAGAGCCTGGAGGTGCTGGAGAGG |
| | GGGGCCTACACCCAGGTGATCTTCCTGGCCAGGAACAACACTATTGTGAATGAACTGGTGAGGGTCACTTCTGAGGGGGCTGGGCTGCAGCTGCAGAAGGTGACTGTGCTGGGGGTGGCCACTGCTCCCCAGCAGGTGCTGAGCA |
| | ATGGGGTGCCTGTGAGCAACTTCACCTACAGCCCTGATACCAAGGTGCTGGACATCTGTGTGAGCCTGCTGATGGGGGAGCAGTTCCTGGTGAGCTGGTGCTGA |
| 8 | > coGAAAA GAA nucleic acid |
| | ATGGGGGTGAGGCACCCTCCCTGCAGCCACAGGCTGCTGGCTGTGTGTGCTCTGGTGAGCCTGGCCACTGCTGCCCTGCTGGGCCACATTCTGCTGCATGATTTCCTGCTGGTGCCCAGGGAACTGTCTGGCAGCTCTCCTGTGC |
| | TGGAGGAGACCCATCCTGCCCACCAGCAGGGGGCCAGCAGGCCTGGCCCTAGGGATGCTCAGGCCCATCCTGGCAGGCCCAGGGCTGTGCCCACTCAGTGTGATGTGCCACCCAACAGCAGGTTTGACTGTGCCCCTGACAAGGC |
| | CATCACCCAGGAGCAGTGTGAGGCCAGGGGCTGCTGCTACATCCCTGCTAAGCAGGGCCTGCAGGGGGCCCAGATGGGGCAGCCCTGGTGCTTCTTCCCCCCCAGCTATCCCAGCTATAAGCTGGAGAACCTGAGCTCTTCTGAG |
| | ATGGGCTACACTGCCACCCTGACCAGGACCACCCCCACCTTCTTCCCCAAGGACATCCTGACCCTGAGGCTGGATGTGATGATGGAGACTGAGAACAGGCTGCACTTCACCATCAAGGACCCTGCCAATAGGAGGTATGAGGTGC |
| | CCCTGGAGACCCCCAGGGTGCACAGCAGGGCCCCCTCTCCCCTGTACTCTGTGGAGTTTTCTGAAGAGCCCTTTGGGGTGATTGTGCACAGGCAGCTGGATGGCAGGGTGCTGCTGAACACCACTGTGGCTCCCCTGTTCTTTGC |
| | TGACCAGTTCCTGCAGCTGAGCACCTCTCTGCCCAGCCAGTATATCACTGGGCTGGCTGAGCATCTGAGCCCCCTGATGCTGAGCACCAGCTGGACCAGGATCACCCTGTGGAATAGGGACCTGGCCCCTACCCCTGGGGCCAAC |
| | CTGTATGGCAGCCACCCTTTCTACCTGGCCCTGGAGGATGGGGGGTCTGCTCATGGGGTGTTCCTGCTGAACAGCAATGCCATGGATGTGGTGCTGCAGCCCAGCCCTGCTCTGAGCTGGAGGAGCACTGGGGGCATCCTGGATG |
| | TGTACATCTTCCTGGGCCCTGAGCCTAAGTCTGTGGTGCAGCAGTACCTGGATGTGGTGGGCTATCCCTTCATGCCCCCCTACTGGGGCCTGGGCTTTCACCTGTGCAGGTGGGGCTATAGCAGCACTGCCATCACCAGGCAGGT |
| | GGTGGAGAATATGACTAGGGCCCATTTCCCCCTGGATGTGCAGTGGAATGACCTGGATTACATGGACAGCAGGAGGGACTTCACCTTCAATAAGGATGGCTTTAGGGACTTTCCTGCCATGGTGCAGGAGCTGCATCAGGGGGGG |
| | AGGAGGTATATGATGATTGTGGATCCTGCCATCAGCAGCTCTGGCCCTGCTGGCAGCTATAGGCCCTATGATGAGGGCCTGAGGAGGGGGGTGTTCATTACCAATGAGACTGGCCAGCCTCTGATTGGCAAGGTCTGGCCTGGCT |
| | CTACTGCCTTTCCTGACTTCACTAACCCCACTGCCCTGGCCTGGTGGGAGGATATGGTGGCTGAGTTCCATGACCAGGTGCCCTTTGATGGCATGTGGATTGACATGAATGAGCCCTCTAACTTCATCAGGGGCTCTGAGGATGG |
| | CTGCCCCAATAATGAGCTGGAGAACCCCCCCTATGTGCCTGGGGTGGTGGGGGGCACCCTGCAGGCTGCCACCATCTGTGCCAGCAGCCACCAGTTCCTGAGCACCCATTATAATCTGCACAACCTGTATGGCCTGACTGAGGCC |
| | ATTGCCAGCCATAGGGCCCTGGTGAAGGCTAGGGGCACTAGGCCTTTTGTGATTAGCAGGAGCACCTTTGCTGGCCATGGCAGGTATGCTGGCCACTGGACTGGGGATGTGTGGAGCAGCTGGGAGCAGCTGGCCAGCTCTGTGC |
| | CTGAGATTCTGCAGTTCAACCTGCTGGGGGTGCCCCTGGTGGGGGCTGATGTGTGTGGCTTTCTGGGCAACACCTCTGAGGAGCTGTGTGTGAGGTGGACCCAGCTGGGGGCCTTCTACCCCTTTATGAGGAATCACAATAGCCT |
| | GCTGAGCCTGCCCCAGGAGCCCTACTCTTTCTCTGAGCCTGCCCAGCAGGCCATGAGGAAGGCCCTGACTCTGAGGTATGCCCTGCTGCCCCACCTGTATACCCTGTTCCACCAGGCCCATGTGGCTGGGGAGACTGTGGCTAGG |
| | CCTCTGTTCCTGGAGTTCCCCAAGGATAGCTCTACCTGGACTGTGGACCACCAGCTGCTGTGGGGGGAGGCCCTGCTGATCACCCCTGTGCTGCAGGCTGGCAAGGCTGAGGTGACTGGCTACTTTCCCCTGGGCACCTGGTATG |
| | ACCTGCAGACTGTGCCCATTGAGGCCCTGGGCAGCCTGCCTCCCCCCCCAGCTGCCCCAAGGGAGCCTGCCATTCACTCTGAGGGCCAGTGGGTGACCCTGCCTGCCCCCCTGGACACCATCAATGTGCACCTGAGGGCTGGCTA |
| | CATTATCCCCCTGCAGGGCCCTGGCCTGACCACCACTGAATCTAGGCAGCAGCCCATGGCCCTGGCTGTGGCCCTGACCAAGGGGGGGGAGGCCAGGGGGGAGCTGTTTTGGGATGATGGGGAGTCTCTGGAGGTGCTGGAGAGG |
| | GGGGCCTACACTCAGGTGATCTTCCTGGCCAGGAATAATACTATTGTGAATGAGCTGGTGAGGGTGACCTCTGAGGGGGCTGGCCTGCAGCTGCAGAAGGTGACTGTGCTGGGGGTGGCCACTGCCCCCCAGCAGGTGCTGAGCA |
| | ATGGGGTGCCTGTGTCTAACTTTACCTATTCTCCTGACACTAAGGTGCTGGATATCTGTGTGTCTCTGCTGATGGGGGAACAGTTCCTGGTGTCTTGGTGCTGA |
| 9 | > coGAA GAA nucleic acid |
| | ATGGGGGTGAGGCACCCTCCCTGCTCTCACAGGCTGCTGGCTGTGTGTGCCCTGGTGAGCCTGGCCACTGCTGCTCTGCTGGGCCACATCCTGCTGCATGACTTCCTGCTGGTCCCTAGGGAGCTGTCTGGCTCTAGCCCTGTCC |
| | TGGAGGAGACTCACCCAGCCCACCAGCAGGGGGCCAGCAGGCCTGGCCCCAGGGATGCCCAGGCCCACCCTGGCAGGCCTAGGGCTGTGCCCACCCAGTGTGATGTGCCCCCTAACAGCAGGTTTGATTGTGCCCCTGACAAGGC |
| | CATCACCCAGGAGCAGTGTGAGGCCAGGGGCTGCTGCTACATCCCTGCCAAGCAGGGCCTGCAGGGGGCCCAGATGGGGCAGCCCTGGTGCTTCTTCCCCCCCTCTTACCCCAGCTATAAGCTGGAGAACCTGAGCTCTTCTGAG |
| | ATGGGCTACACTGCCACTCTGACCAGGACTACCCCTACTTTCTTCCCCAAGGACATCCTGACCCTGAGGCTGGATGTGATGATGGAGACTGAGAACAGGCTGCACTTTACCATTAAGGATCCTGCCAACAGGAGGTATGAGGTGC |
| | CCCTGGAGACTCCCAGGGTGCATAGCAGGGCCCCCTCTCCCCTGTACTCTGTGGAGTTCTCTGAGGAGCCCTTTGGGGTGATTGTGCACAGGCAGCTGGATGGCAGGGTGCTGCTGAATACCACTGTGGCTCCCCTGTTTTTTGC |
| | TGACCAGTTTCTGCAGCTGAGCACCTCTCTGCCCAGCCAGTATATTACTGGCCTGGCTGAGCATCTGAGCCCCCTGATGCTGTCTACCAGCTGGACCAGGATCACTCTGTGGAACAGGGATCTGGCCCCTACCCCTGGGGCCAAT |
| | CTGTATGGCAGCCACCCTTTCTACCTGGCCCTGGAGGATGGGGGGTCTGCTCATGGGGTGTTCCTGCTGAACAGCAATGCTATGGATGTGGTGCTGCAGCCCTCTCCTGCTCTGAGCTGGAGAAGCACTGGGGGGATCCTGGATG |
| | TGTACATCTTCCTGGGGCCTGAGCCCAAGTCTGTGGTGCAGCAGTACCTGGATGTGGTGGGCTACCCTTTTATGCCTCCTTATTGGGGCCTGGGGTTTCACCTGTGCAGGTGGGGGTACAGCTCTACTGCTATCACCAGGCAGGT |
| | GGTGGAGAACATGACCAGGGCCCACTTCCCCCTGGATGTGCAGTGGAATGATCTGGATTACATGGACTCTAGGAGGGACTTCACCTTCAACAAAGATGGCTTCAGGGACTTCCCTGCCATGGTGCAGGAGCTGCACCAGGGGGGC |
| | AGAAGGTATATGATGATTGTGGATCCTGCTATCAGCAGCTCTGGGCCTGCTGGCTCTTACAGGCCCTATGATGAGGGGCTGAGGAGGGGGGTGTTCATTACTAATGAAACTGGCCAGCCCCTGATTGGCAAGGTGTGGCCTGGCA |
| | GCACTGCTTTCCCTGACTTCACTAACCCTACTGCCCTGGCCTGGTGGGAGGACATGGTGGCTGAGTTCCATGACCAGGTGCCCTTTGATGGCATGTGGATTGACATGAATGAGCCCTCTAATTTTATCAGGGGGTCTGAGGATGG |
| | CTGCCCCAACAATGAGCTGGAGAATCCCCCCTATGTGCCTGGGGTGGTGGGGGGCACCCTGCAGGCTGCCACCATCTGTGCCAGCTCTCACCAGTTTCTGTCTACCCACTATAACCTGCACAACCTGTATGGGCTGACTGAGGCC |
| | ATTGCCAGCCACAGGGCCCTGGTGAAGGCCAGGGGCACCAGGCCCTTTGTGATCAGCAGGTCTACCTTTGCTGGCCATGGGAGGTATGCTGGCCACTGGACTGGGGATGTGTGGAGCAGCTGGGAGCAGCTGGCCAGCTCTGTGC |
| | CTGAGATCCTGCAGTTCAACCTGCTGGGGGTGCCCCTGGTGGGGGCTGATGTGTGTGGCTTCCTGGGCAACACCTCTGAGGAGCTGTGTGTGAGGTGGACCCAGCTGGGGGCTTTTTATCCCTTCATGAGGAACCACAACAGCCT |
| | GCTGAGCCTGCCTCAGGAGCCCTACAGCTTTTCTGAGCCTGCCCAGCAGGCCATGAGAAAGGCCCTGACCCTGAGGTATGCCCTGCTGCCCCACCTGTATACCCTGTTCCACCAGGCTCATGTGGCTGGGGAGACTGTGGCCAGG |
| | CCCCTGTTCCTGGAGTTCCCCAAGGACAGCTCTACCTGGACTGTGGACCACCAGCTGCTGTGGGGGGAGGCCCTGCTGATCACCCCTGTGCTGCAGGCTGGCAAGGCTGAGGTGACTGGCTACTTCCCCCTGGGCACCTGGTATG |
| | ACCTGCAGACTGTGCCCATTGAGGCCCTGGGCAGCCTGCCCCCCCCCCCAGCTGCTCCTAGGGAGCCTGCCATCCACTCTGAGGGCCAGTGGGTGACCCTGCCTGCTCCCCTGGACACCATCAATGTGCACCTGAGGGCTGGCTA |
| | CATCATCCCCCTGCAGGGCCCTGGGCTGACCACCACTGAGTCTAGGCAGCAGCCCATGGCCCTGGCTGTGGCCCTGACCAAGGGGGGGGAGGCCAGGGGGGAGCTGTTCTGGGATGATGGGGAGAGCCTGGAGGTGCTGGAGAGG |
| | GGGGCCTACACTCAGGTGATCTTCCTGGCCAGGAACAATACCATTGTGAATGAGCTGGTGAGGGTGACTTCTGAGGGGGCTGGCCTGCAGCTGCAGAAGGTGACTGTGCTGGGGGTGGCCACTGCCCCTCAGCAGGTGCTGTCTA |
| | ATGGGGTGCCTGTGAGCAACTTCACTTACAGCCCTGACACCAAGGTGCTGGACATCTGTGTGAGCCTGCTGATGGGGGAGCAGTTCCTGGTGTCTTGGTGTTGA |
| 10 | > coGAA GAA nucleic acid |
| | ATGGGGGTGAGGCATCCCCCCTGCTCTCACAGGCTGCTGGCTGTGTGTGCCCTGGTGAGCCTGGCCACTGCTGCCCTGCTGGGCCATATCCTGCTGCATGACTTCCTGCTGGTGCCCAGGGAGCTGTCTGGCTCTTCTCCTGTGC |
| | TGGAGGAGACTCACCCTGCCCACCAGCAGGGGGCCAGCAGGCCTGGCCCTAGGGATGCCCAGGCTCACCCTGGCAGGCCCAGGGCTGTGCCCACTCAGTGTGATGTGCCCCCCAACAGCAGGTTTGACTGTGCCCCTGACAAGGC |
| | TATTACCCAGGAGCAGTGTGAGGCCAGGGGGTGTTGCTACATTCCTGCCAAGCAGGGCCTGCAGGGGGCCCAGATGGGCCAGCCCTGGTGCTTCTTCCCTCCCAGCTACCCCAGCTACAAGCTGGAGAATCTGAGCAGCTCTGAG |
| | ATGGGCTACACTGCCACTCTGACTAGGACTACTCCCACCTTTTTCCCCAAGGATATCCTGACCCTGAGGCTGGATGTGATGATGGAGACTGAGAACAGGCTGCACTTCACCATCAAGGATCCTGCCAACAGGAGGTATGAGGTGC |
| | CCCTGGAGACCCCCAGGGTGCACAGCAGGGCCCCCAGCCCCCTGTACTCTGTGGAGTTCTCTGAGGAGCCCTTTGGGGTGATTGTGCATAGGCAGCTGGATGGCAGGGTGCTGCTGAATACCACTGTGGCTCCCCTGTTCTTTGC |
| | TGATCAGTTCCTGCAGCTGAGCACTAGCCTGCCCTCTCAGTACATCACTGGGCTGGCTGAGCACCTGAGCCCCCTGATGCTGTCTACTTCTTGGACCAGGATCACCCTGTGGAACAGGGACCTGGCCCCCACTCCTGGGGCCAAC |
| | CTGTATGGCAGCCACCCCTTCTACCTGGCCCTGGAGGATGGGGGCTCTGCCCATGGGGTGTTTCTGCTGAACAGCAATGCTATGGATGTGGTGCTGCAGCCTAGCCCTGCTCTGTCTTGGAGGAGCACTGGGGGCATCCTGGATG |
| | TGTATATTTTCCTGGGGCCTGAGCCCAAGTCTGTGGTGCAGCAGTACCTGGATGTGGTGGGGTACCCTTTCATGCCCCCCTATTGGGGCCTGGGCTTCCACCTGTGCAGGTGGGGCTATAGCAGCACTGCCATCACCAGGCAGGT |
| | GGTGGAAAATATGACTAGGGCCCACTTCCCCCTGGATGTGCAGTGGAATGACCTGGACTACATGGATTCTAGGAGGGACTTCACCTTCAACAAGGATGGGTTTAGGGATTTCCCTGCCATGGTGCAGGAGCTGCACCAGGGGGGC |
| | AGGAGGTACATGATGATTGTGGACCCTGCCATCAGCAGCTCTGGCCCAGCTGGCTCTTACAGGCCCTATGATGAGGGCCTGAGGAGAGGGGTGTTCATCACCAATGAAACTGGCCAGCCCCTGATTGGCAAGGTGTGGCCTGGCT |
| | CTACTGCCTTCCCTGATTTCACCAACCCCACTGCCCTGGCCTGGTGGGAGGATATGGTGGCTGAATTCCATGACCAGGTGCCCTTTGATGGCATGTGGATTGACATGAATGAGCCCAGCAACTTTATTAGGGGCTCTGAGGATGG |
| | GTGCCCCAACAATGAGCTGGAGAATCCCCCTTATGTGCCTGGGGTGGTGGGGGGCACTCTGCAGGCTGCCACCATCTGTGCTAGCAGCCACCAGTTCCTGAGCACTCACTACAACCTGCATAACCTGTATGGCCTGACTGAGGCC |
| | ATTGCTTCTCACAGGGCTCTGGTCAAGGCCAGGGGGACCAGACCCTTTGTGATCAGCAGGAGCACCTTTGCTGGCCATGGCAGGTATGCTGGCCACTGGACTGGGGATGTGTGGAGCAGCTGGGAGCAGCTGGCCAGCTCTGTGC |
| | CTGAGATTCTGCAGTTTAACCTGCTGGGGGTGCCCCTGGTGGGGGCTGATGTGTGTGGCTTCCTGGGGAACACCTCTGAGGAGCTGTGTGTGAGGTGGACCCAGCTGGGGGCTTTTTACCCCTTTATGAGGAACCATAATAGCCT |
| | GCTGAGCCTGCCTCAGGAGCCCTACAGCTTCTCTGAGCCTGCCCAGCAGGCCATGAGGAAGGCCCTGACCCTGAGGTATGCCCTGCTGCCCCATCTGTACACCCTGTTTCACCAGGCCCATGTGGCTGGGGAGACTGTGGCCAGA |
| | CCCCTGTTCCTGGAGTTCCCAAAGGACTCTTCTACCTGGACTGTGGACCACCAGCTGCTGTGGGGGGAGGCCCTGCTGATTACCCCTGTGCTGCAGGCTGGGAAGGCTGAGGTGACTGGGTATTTCCCCCTGGGCACCTGGTATG |
| | ACCTGCAGACTGTGCCAATTGAGGCTCTGGGCAGCCTGCCTCCCCCCCCTGCTGCTCCTAGGGAGCCTGCCATTCACTCTGAGGGCCAGTGGGTGACCCTGCCAGCCCCTCTGGACACTATCAATGTGCACCTGAGGGCTGGCTA |
| | CATCATCCCCCTGCAGGGGCCTGGCCTGACTACCACTGAGAGCAGGCAGCAGCCTATGGCTCTGGCTGTGGCCCTGACCAAGGGGGGGGAGGCCAGGGGGGAGCTGTTCTGGGATGATGGGGAGTCTCTGGAGGTGCTGGAGAGG |
| | GGGGCCTACACCCAGGTGATCTTCCTGGCCAGGAATAATACCATTGTGAATGAGCTGGTGAGAGTGACTTCTGAGGGGGCTGGCCTGCAGCTGCAGAAGGTGACTGTGCTGGGGGTGGCCACTGCCCCCCAGCAGGTCCTGTCTA |
| | ATGGGGTGCCTGTGTCTAACTTTACCTACAGCCCTGACACCAAGGTGCTGGACATCTGTGTGAGCCTGCTGATGGGGGAGCAGTTCCTGGTGAGCTGGTGTTGA |
| 11 | > coGAA GAA nucleic acid |
| | ATGGGGGTGAGGCACCCCCCTTGCTCTCACAGGCTGCTGGCTGTCTGTGCCCTGGTGAGCCTGGCCACTGCTGCTCTGCTGGGGCACATCCTGCTGCATGATTTTCTGCTGGTGCCCAGGGAGCTGTCTGGGAGCTCTCCAGTGC |
| | TGGAGGAGACCCACCCTGCCCACCAGCAGGGGGCCAGCAGACCTGGGCCCAGGGATGCTCAGGCTCACCCTGGCAGGCCCAGGGCTGTGCCCACTCAGTGTGATGTGCCCCCCAACAGCAGGTTTGACTGTGCCCCTGACAAGGC |
| | CATCACCCAGGAGCAGTGTGAGGCTAGGGGCTGCTGTTACATCCCTGCCAAGCAGGGCCTGCAGGGGGCCCAGATGGGCCAGCCCTGGTGCTTCTTCCCCCCCAGCTACCCCAGCTACAAGCTGGAGAACCTGTCTAGCTCTGAG |
| | ATGGGCTATACTGCTACCCTGACTAGGACCACCCCTACTTTCTTCCCCAAGGACATCCTGACCCTGAGGCTGGATGTGATGATGGAGACTGAGAATAGGCTGCATTTCACCATCAAGGACCCTGCTAACAGGAGGTATGAAGTGC |
| | CCCTGGAGACCCCCAGGGTGCATAGCAGGGCCCCCTCTCCTCTGTACTCTGTGGAGTTCTCTGAAGAGCCCTTTGGGGTGATTGTGCATAGGCAGCTGGATGGCAGGGTGCTGCTGAACACTACTGTGGCCCCCCTGTTTTTTGC |
| | TGACCAGTTCCTGCAGCTGAGCACCAGCCTGCCCAGCCAGTACATCACTGGCCTGGCTGAGCACCTGAGCCCACTGATGCTGAGCACCAGCTGGACTAGGATTACCCTGTGGAACAGGGACCTGGCCCCCACTCCTGGGGCCAAC |
| | CTGTATGGCAGCCACCCCTTCTACCTGGCCCTGGAGGATGGGGGCTCTGCCCATGGGGTGTTCCTGCTGAACAGCAATGCCATGGATGTGGTGCTGCAGCCCTCTCCTGCCCTGTCTTGGAGGAGCACTGGGGGGATTCTGGATG |
| | TGTACATCTTTCTGGGGCCTGAGCCCAAGTCTGTGGTGCAGCAGTACCTGGATGTGGTGGGGTACCCCTTTATGCCTCCCTATTGGGGCCTGGGGTTCCATCTGTGCAGGTGGGGGTACTCTAGCACTGCTATCACCAGGCAGGT |
| | GGTGGAGAACATGACCAGGGCCCATTTCCCCCTGGATGTGCAGTGGAATGACCTGGATTACATGGACTCTAGAAGGGACTTCACCTTCAACAAGGATGGCTTCAGGGATTTCCCTGCTATGGTGCAGGAGCTGCATCAGGGGGGC |
| | AGGAGGTACATGATGATTGTGGATCCTGCCATCAGCAGCTCTGGGCCTGCTGGGAGCTATAGGCCTTATGATGAGGGCCTGAGGAGGGGGGTGTTTATTACCAATGAGACTGGCCAGCCCCTGATTGGCAAGGTGTGGCCAGGCA |
| | GCACTGCCTTCCCTGACTTCACTAACCCTACTGCTCTGGCCTGGTGGGAGGACATGGTGGCTGAATTTCATGACCAGGTGCCCTTTGATGGGATGTGGATTGACATGAATGAGCCTTCTAATTTCATCAGGGGCTCTGAGGATGG |
| | GTGCCCCAACAATGAGCTGGAGAACCCCCCCTATGTGCCTGGGGTGGTGGGGGGCACCCTGCAGGCTGCCACTATCTGTGCTAGCAGCCATCAGTTCCTGAGCACTCACTACAATCTGCACAACCTGTATGGCCTGACTGAGGCC |
| | ATTGCCAGCCATAGGGCCCTGGTGAAGGCTAGGGGCACTAGGCCCTTTGTGATCAGCAGGAGCACCTTTGCTGGCCATGGGAGGTATGCTGGCCACTGGACTGGGGATGTGTGGAGCAGCTGGGAGCAGCTGGCCAGCTCTGTGC |
| | CTGAGATCCTGCAGTTCAACCTGCTGGGGGTGCCCCTGGTGGGGGCTGATGTGTGTGGCTTCCTGGGGAACACCTCTGAAGAGCTGTGTGTGAGGTGGACCCAGCTGGGGGCCTTCTACCCCTTCATGAGGAATCACAACAGCCT |
| | GCTGAGCCTGCCTCAGGAGCCCTACTCTTTCTCTGAGCCTGCCCAGCAGGCCATGAGGAAGGCTCTGACCCTGAGGTATGCCCTGCTGCCTCACCTGTACACCCTGTTTCATCAGGCCCATGTGGCTGGGGAGACTGTGGCCAGG |
| | CCCCTGTTCCTGGAGTTCCCCAAGGATAGCAGCACCTGGACTGTGGACCACCAGCTGCTGTGGGGGGAAGCCCTGCTGATCACCCCTGTGCTGCAGGCTGGCAAGGCTGAGGTGACTGGCTACTTCCCCCTGGGCACCTGGTATG |
| | ACCTGCAGACTGTGCCCATTGAGGCCCTGGGCTCTCTGCCCCCTCCCCCTGCTGCCCCCAGGGAGCCTGCCATCCACTCTGAGGGCCAGTGGGTGACTCTGCCTGCCCCTCTGGATACCATTAATGTGCACCTGAGGGCTGGGTA |
| | CATCATCCCTCTGCAGGGCCCTGGCCTGACTACCACTGAGAGCAGGCAGCAGCCTATGGCCCTGGCTGTGGCTCTGACCAAGGGGGGGGAGGCCAGGGGGGAGCTGTTCTGGGATGATGGGGAGAGCCTGGAGGTGCTGGAGAGG |
| | GGGGCTTATACCCAGGTGATCTTCCTGGCCAGGAACAACACCATTGTGAATGAGCTGGTGAGGGTGACCTCTGAGGGGGCTGGCCTGCAGCTGCAGAAGGTGACTGTGCTGGGGGTGGCCACTGCCCCTCAGCAGGTGCTGAGCA |
| | ATGGGGTGCCTGTGAGCAATTTCACTTACAGCCCTGACACCAAGGTGCTGGATATTTGTGTGAGCCTGCTGATGGGGGAGCAGTTCCTGGTGTCTTGGTGCTAA |
| 12 | > coGAA GAA nucleic acid |
| | ATGGGGGTGAGGCATCCCCCCTGCAGCCATAGGCTGCTGGCTGTGTGTGCCCTGGTGAGCCTGGCTACTGCTGCCCTGCTGGGGCACATCCTGCTGCATGACTTCCTGCTGGTGCCCAGGGAACTGTCTGGCAGCAGCCCTGTGC |
| | TGGAGGAGACTCATCCTGCTCACCAGCAGGGGGCCTCCAGGCCTGGCCCCAGGGATGCCCAGGCTCACCCTGGCAGGCCCAGGGCTGTGCCCACTCAGTGTGATGTGCCCCCCAACAGCAGGTTTGACTGTGCCCCTGACAAGGC |
| | CATCACTCAGGAGCAGTGTGAGGCCAGGGGCTGCTGCTATATCCCTGCCAAGCAGGGGCTGCAGGGGGCCCAGATGGGGCAGCCTTGGTGCTTTTTCCCCCCCAGCTACCCCAGCTACAAGCTGGAGAACCTGTCTAGCTCTGAG |
| | ATGGGCTATACTGCCACTCTGACCAGGACCACCCCCACCTTCTTCCCCAAAGACATTCTGACCCTGAGGCTGGATGTGATGATGGAGACTGAGAATAGGCTGCACTTCACCATCAAGGACCCTGCTAACAGGAGGTATGAGGTGC |
| | CCCTGGAGACTCCTAGGGTGCACAGCAGGGCCCCCAGCCCCCTGTATTCTGTGGAGTTCTCTGAGGAGCCCTTTGGGGTGATTGTGCATAGGCAGCTGGATGGGAGGGTGCTGCTGAACACTACTGTGGCTCCCCTGTTCTTTGC |
| | TGACCAGTTCCTGCAGCTGAGCACCAGCCTGCCCTCTCAGTACATCACTGGCCTGGCTGAGCACCTGAGCCCCCTGATGCTGAGCACCAGCTGGACCAGGATCACTCTGTGGAACAGAGACCTGGCCCCCACCCCTGGGGCCAAC |
| | CTGTATGGCAGCCATCCCTTCTACCTGGCTCTGGAGGATGGGGGGTCTGCCCATGGGGTGTTTCTGCTGAACAGCAATGCCATGGATGTGGTGCTGCAGCCCAGCCCTGCCCTGAGCTGGAGGAGCACTGGGGGCATCCTGGATG |
| | TGTACATTTTCCTGGGCCCTGAACCCAAGTCTGTGGTGCAGCAGTACCTGGATGTGGTGGGGTATCCCTTCATGCCTCCTTACTGGGGCCTGGGCTTCCATCTGTGCAGGTGGGGCTACAGCAGCACTGCTATCACCAGGCAGGT |
| | GGTGGAGAACATGACCAGGGCCCATTTCCCCCTGGATGTGCAGTGGAATGATCTGGACTACATGGACTCTAGGAGGGACTTCACTTTCAACAAGGATGGCTTCAGAGATTTCCCTGCCATGGTGCAGGAGCTGCACCAGGGGGGC |
| | AGAAGGTACATGATGATTGTGGACCCTGCCATCTCTAGCTCTGGCCCTGCTGGGAGCTACAGGCCCTATGATGAGGGGCTGAGGAGGGGGGTGTTTATCACCAATGAGACTGGCCAGCCCCTGATTGGCAAGGTGTGGCCTGGCA |
| | GCACTGCCTTCCCTGACTTCACCAATCCCACTGCCCTGGCCTGGTGGGAGGATATGGTGGCTGAGTTCCATGACCAGGTGCCCTTTGATGGGATGTGGATTGACATGAATGAGCCCAGCAACTTTATCAGGGGCTCTGAGGATGG |
| | CTGCCCCAACAATGAACTGGAAAACCCCCCCTATGTGCCTGGGGTGGTGGGGGGCACTCTGCAGGCTGCCACTATCTGTGCCAGCAGCCACCAGTTCCTGAGCACCCACTACAACCTGCACAATCTGTATGGCCTGACTGAGGCC |
| | ATTGCCAGCCACAGGGCCCTGGTGAAGGCTAGGGGCACCAGGCCCTTTGTGATCAGCAGGAGCACCTTTGCTGGCCATGGCAGGTATGCTGGCCACTGGACTGGGGATGTGTGGAGCTCTTGGGAGCAGCTGGCCAGCTCTGTGC |
| | CTGAGATCCTGCAGTTCAACCTGCTGGGGGTGCCCCTGGTGGGGGCTGATGTGTGTGGCTTTCTGGGCAATACTTCTGAGGAGCTGTGTGTGAGGTGGACCCAGCTGGGGGCCTTTTACCCCTTCATGAGGAACCACAACTCTCT |
| | GCTGAGCCTGCCCCAGGAACCCTATAGCTTTTCTGAGCCTGCCCAGCAGGCCATGAGGAAGGCCCTGACTCTGAGGTATGCTCTGCTGCCCCACCTGTACACCCTGTTCCACCAGGCCCATGTGGCTGGGGAGACTGTGGCCAGG |
| | CCCCTGTTCCTGGAGTTCCCCAAGGACAGCAGCACTTGGACTGTGGACCACCAGCTGCTGTGGGGGGAGGCTCTGCTGATCACTCCTGTGCTGCAGGCTGGCAAGGCTGAGGTGACTGGCTACTTCCCCCTGGGGACTTGGTATG |
| | ACCTGCAGACTGTGCCTATTGAGGCCCTGGGGAGCCTGCCTCCCCCCCCTGCTGCTCCCAGGGAGCCTGCCATCCACTCTGAGGGGCAGTGGGTGACTCTGCCTGCTCCCCTGGACACTATCAATGTGCACCTGAGGGCTGGGTA |
| | CATCATCCCCCTGCAGGGCCCTGGGCTGACCACCACTGAGTCTAGGCAGCAGCCCATGGCTCTGGCTGTGGCTCTGACCAAGGGGGGGGAGGCCAGGGGGGAGCTGTTCTGGGATGATGGGGAGAGCCTGGAGGTGCTGGAGAGG |
| | GGGGCCTACACCCAGGTGATCTTCCTGGCTAGAAACAACACCATTGTGAATGAGCTGGTGAGGGTGACTTCTGAGGGGGCTGGGCTGCAGCTGCAGAAGGTGACTGTGCTGGGGGTGGCTACTGCCCCACAGCAGGTGCTGTCTA |
| | ATGGGGTGCCAGTGTCTAACTTCACCTATAGCCCTGATACTAAGGTGCTGGACATCTGTGTGTCTCTGCTGATGGGGGAGCAGTTCCTGGTGTCTTGGTGCTGA |
| 13 | > coGAA GAA nucleic acid |
| | ATGGGGGTGAGGCATCCTCCCTGCAGCCATAGGCTGCTGGCTGTGTGTGCCCTGGTGAGCCTGGCTACTGCTGCTCTGCTGGGGCACATCCTGCTGCATGATTTCCTGCTGGTGCCTAGGGAGCTGTCTGGCAGCAGCCCTGTCC |
| | TGGAGGAGACCCACCCTGCCCATCAGCAGGGGGCCTCTAGACCTGGCCCCAGGGATGCCCAGGCCCATCCTGGGAGGCCCAGGGCTGTGCCCACCCAGTGTGATGTGCCTCCCAACAGCAGGTTTGACTGTGCTCCTGACAAAGC |
| | CATCACCCAGGAGCAGTGTGAAGCCAGGGGCTGTTGTTACATTCCTGCCAAGCAGGGCCTGCAGGGGGCCCAGATGGGCCAGCCCTGGTGCTTCTTCCCCCCTAGCTACCCCAGCTACAAGCTGGAGAATCTGAGCAGCTCTGAA |
| | ATGGGCTACACTGCCACCCTGACTAGGACCACCCCCACCTTCTTCCCTAAGGATATCCTGACCCTGAGGCTGGATGTGATGATGGAGACTGAGAACAGGCTGCACTTCACCATCAAGGATCCTGCCAACAGGAGGTATGAGGTGC |
| | CCCTGGAGACCCCCAGGGTGCACAGCAGGGCTCCCTCTCCCCTGTATTCTGTGGAATTCTCTGAGGAGCCCTTTGGGGTGATTGTGCACAGGCAGCTGGATGGCAGAGTGCTGCTGAACACTACTGTGGCTCCCCTGTTCTTTGC |
| | TGATCAGTTCCTGCAGCTGAGCACTTCTCTGCCCAGCCAGTACATCACTGGGCTGGCTGAGCACCTGAGCCCTCTGATGCTGAGCACCAGCTGGACCAGGATCACCCTGTGGAACAGGGACCTGGCTCCCACCCCTGGGGCCAAT |
| | CTGTATGGCAGCCACCCCTTCTACCTGGCTCTGGAGGATGGGGGCTCTGCCCATGGGGTGTTCCTGCTGAACTCTAATGCCATGGATGTGGTGCTGCAGCCCAGCCCTGCCCTGAGCTGGAGGAGCACTGGGGGCATCCTGGATG |
| | TGTACATCTTCCTGGGCCCTGAGCCCAAGTCTGTGGTCCAGCAGTATCTGGATGTGGTGGGGTACCCTTTCATGCCCCCCTACTGGGGCCTGGGCTTCCACCTGTGCAGGTGGGGGTACAGCAGCACTGCCATCACCAGGCAGGT |
| | GGTGGAGAATATGACCAGGGCCCACTTCCCCCTGGATGTGCAGTGGAATGATCTGGACTACATGGATTCTAGGAGGGACTTCACCTTCAACAAGGATGGCTTCAGGGACTTTCCTGCCATGGTGCAGGAGCTGCACCAGGGGGGC |
| | AGGAGGTACATGATGATTGTGGACCCAGCCATCTCTAGCTCTGGGCCAGCTGGCAGCTACAGGCCCTATGATGAGGGCCTGAGGAGGGGGGTGTTCATCACTAATGAGACTGGCCAGCCCCTGATTGGCAAGGTGTGGCCTGGGA |
| | GCACTGCCTTCCCTGACTTCACCAACCCCACTGCCCTGGCCTGGTGGGAGGATATGGTGGCTGAGTTCCATGACCAGGTGCCCTTTGATGGGATGTGGATTGACATGAATGAGCCCTCTAACTTTATTAGGGGCTCTGAGGATGG |
| | GTGCCCTAACAATGAGCTGGAGAACCCCCCTTATGTGCCTGGGGTGGTGGGGGGCACCCTGCAGGCTGCCACCATCTGTGCCAGCAGCCACCAGTTCCTGTCTACCCACTACAACCTGCACAATCTGTATGGGCTGACTGAGGCT |
| | ATTGCCAGCCACAGGGCCCTGGTGAAGGCTAGGGGGACCAGGCCTTTTGTGATCAGCAGGAGCACCTTTGCTGGGCATGGCAGATATGCTGGCCATTGGACTGGGGATGTGTGGTCTAGCTGGGAGCAGCTGGCCAGCTCTGTGC |
| | CTGAGATCCTGCAGTTCAATCTGCTGGGGGTGCCCCTGGTGGGGGCTGATGTGTGTGGGTTCCTGGGCAATACCTCTGAGGAGCTGTGTGTGAGGTGGACCCAGCTGGGGGCCTTCTACCCCTTCATGAGGAACCACAACAGCCT |
| | GCTGAGCCTGCCTCAGGAGCCCTATTCTTTTTCTGAGCCTGCCCAGCAGGCTATGAGGAAGGCCCTGACTCTGAGGTATGCCCTGCTGCCTCACCTGTACACCCTGTTCCACCAGGCCCATGTGGCTGGGGAGACTGTGGCCAGG |
| | CCCCTGTTCCTGGAGTTCCCCAAGGATAGCTCTACCTGGACTGTGGACCATCAGCTGCTGTGGGGGGAGGCCCTGCTGATCACCCCTGTGCTGCAGGCTGGCAAGGCTGAGGTGACTGGCTACTTTCCTCTGGGCACCTGGTATG |
| | ATCTGCAGACTGTGCCCATTGAAGCCCTGGGCAGCCTGCCTCCTCCCCCTGCTGCCCCTAGGGAGCCTGCCATCCACTCTGAGGGCCAGTGGGTGACCCTGCCAGCCCCTCTGGACACCATCAATGTGCATCTGAGGGCTGGCTA |
| | CATCATTCCCCTGCAGGGCCCTGGGCTGACCACCACTGAGAGCAGGCAGCAGCCCATGGCTCTGGCTGTGGCCCTGACCAAGGGGGGGGAGGCCAGGGGGGAGCTGTTCTGGGATGATGGGGAGAGCCTGGAGGTGCTGGAGAGG |
| | GGGGCCTACACCCAGGTGATCTTCCTGGCCAGGAATAATACCATTGTGAATGAGCTGGTGAGGGTGACTTCTGAGGGGGCTGGCCTGCAGCTGCAGAAGGTGACTGTGCTGGGGGTGGCTACTGCTCCTCAGCAGGTGCTGTCTA |
| | ATGGGGTGCCTGTGAGCAACTTCACTTACAGCCCTGACACTAAGGTGCTGGACATTTGTGTGAGCCTGCTGATGGGGGAGCAGTTCCTGGTGTCTTGGTGCTGA |
| 14 | > coGAAAA GAA nucleic acid |
| | ATGGGAGTGAGGCACCCCCCCTGCTCCCATAGACTCCTGGCTGTCTGTGCCCTGGTGTCCTTGGCAACAGCTGCACTCCTGGGGCACATCCTACTCCATGATTTCCTGCTGGTTCCCAGAGAGCTGAGTGGCTCCTCCCCAGTCC |
| | TGGAGGAGACTCACCCAGCTCACCAGCAGGGAGCCAGCAGACCAGGGCCCAGAGATGCCCAGGCACACCCTGGCAGACCCAGAGCAGTGCCCACACAGTGTGATGTCCCCCCCAACAGCAGATTTGATTGTGCCCCTGACAAGGC |
| | CATAACCCAGGAACAGTGTGAGGCCAGAGGCTGCTGCTACATCCCTGCAAAGCAGGGGCTGCAGGGAGCCCAGATGGGGCAGCCCTGGTGCTTCTTCCCACCCAGCTACCCCAGCTACAAGCTGGAGAACCTGAGCTCCTCTGAA |
| | ATGGGCTACACAGCCACCCTGACCAGAACCACCCCCACCTTCTTCCCCAAGGACATCCTGACCCTGAGACTGGATGTGATGATGGAGACTGAGAACAGACTCCACTTCACCATCAAAGATCCAGCTAACAGGAGATATGAGGTGC |
| | CCTTAGAGACCCCTAGAGTCCACAGCAGAGCACCTTCCCCACTCTACTCTGTGGAGTTCTCTGAGGAGCCCTTTGGGGTGATTGTGCACAGACAGCTGGATGGCAGAGTGCTGCTGAACACAACAGTGGCTCCCCTGTTCTTTGC |
| | TGACCAGTTCCTTCAGCTGTCCACCTCTCTGCCCTCTCAGTATATCACAGGCCTGGCTGAGCACCTCAGTCCCCTGATGCTCAGCACCAGCTGGACCAGGATCACCCTGTGGAACAGAGACCTTGCTCCCACACCTGGTGCCAAC |
| | CTCTATGGGTCTCACCCTTTCTACCTAGCTCTGGAGGATGGAGGGTCTGCACATGGGGTGTTCCTGCTAAACAGCAATGCCATGGATGTAGTCCTGCAGCCCAGCCCTGCCCTTAGCTGGAGGTCTACAGGTGGGATCCTGGATG |
| | TCTACATCTTCCTAGGCCCAGAGCCCAAGTCTGTGGTGCAGCAGTACCTGGATGTGGTAGGATACCCCTTCATGCCTCCATACTGGGGCCTGGGCTTCCACCTGTGCAGATGGGGCTACTCCTCCACAGCTATCACTAGACAGGT |
| | GGTGGAGAACATGACCAGGGCCCACTTCCCCCTGGATGTCCAGTGGAATGATCTAGACTACATGGACTCCAGAAGGGACTTCACCTTCAACAAGGATGGCTTCAGAGACTTCCCTGCCATGGTGCAGGAGCTGCACCAGGGAGGA |
| | AGAAGATACATGATGATTGTGGATCCTGCCATCAGCAGCTCTGGCCCTGCTGGGAGCTACAGGCCCTATGATGAGGGTCTGAGAAGGGGGGTTTTCATCACCAATGAGACAGGCCAGCCTCTGATTGGGAAGGTGTGGCCAGGGT |
| | CCACTGCCTTCCCAGACTTCACCAACCCCACAGCCCTGGCCTGGTGGGAGGACATGGTGGCTGAGTTCCATGACCAGGTGCCCTTTGATGGCATGTGGATTGACATGAATGAGCCTTCCAACTTCATAAGAGGCTCTGAGGATGG |
| | CTGCCCCAACAATGAGCTAGAGAACCCACCCTATGTGCCTGGGGTAGTTGGGGGGACCCTCCAGGCTGCCACCATCTGTGCCTCCAGCCACCAGTTTCTCTCCACACACTACAACCTGCACAACCTCTATGGCCTGACAGAAGCC |
| | ATTGCCTCCCACAGGGCTCTGGTGAAGGCTAGAGGGACAAGACCATTTGTGATCTCCAGATCTACCTTTGCTGGCCATGGCAGATATGCTGGCCACTGGACAGGGGATGTGTGGAGCTCCTGGGAGCAGCTAGCCTCCTCTGTGC |
| | CAGAAATCCTGCAGTTTAACCTGCTGGGGGTGCCTCTGGTTGGGGCTGATGTCTGTGGCTTCCTGGGCAACACCTCAGAGGAGCTGTGTGTGAGATGGACCCAGCTGGGGGCCTTCTACCCCTTCATGAGAAACCATAACAGCCT |
| | GCTCAGTCTGCCCCAGGAGCCTTACAGCTTCTCTGAGCCTGCCCAGCAGGCCATGAGGAAGGCCCTCACCCTGAGATATGCACTCCTCCCCCACCTCTACACACTGTTCCACCAGGCCCATGTAGCAGGGGAGACAGTGGCCAGA |
| | CCCCTCTTCCTGGAGTTCCCCAAGGACTCTAGCACCTGGACTGTGGACCACCAGCTCCTGTGGGGGGAGGCCCTGCTCATCACCCCAGTGCTCCAGGCTGGGAAGGCTGAAGTGACTGGCTACTTCCCCTTGGGCACATGGTATG |
| | ACCTGCAGACAGTGCCAATAGAGGCCCTTGGCAGCCTCCCACCCCCACCTGCAGCTCCCAGAGAGCCAGCCATCCACTCTGAGGGGCAGTGGGTGACACTGCCAGCCCCCCTGGACACCATCAATGTGCACCTAAGAGCTGGGTA |
| | CATCATCCCCCTGCAGGGCCCTGGCCTCACAACCACAGAGTCCAGACAGCAGCCCATGGCCCTGGCTGTGGCCCTGACCAAGGGTGGAGAGGCCAGAGGGGAGCTGTTCTGGGATGATGGAGAGAGCCTAGAAGTGCTGGAGAGA |
| | GGGGCCTACACACAGGTCATCTTCCTGGCCAGGAATAACACAATTGTGAATGAGCTGGTAAGAGTGACCAGTGAGGGAGCTGGCCTGCAGCTGCAGAAGGTGACTGTCCTGGGAGTGGCCACAGCACCCCAGCAGGTCCTCTCCA |
| | ATGGTGTCCCTGTCTCCAACTTCACCTACAGCCCTGACACCAAGGTCCTAGACATCTGTGTCAGTCTGTTGATGGGAGAGCAGTTTCTGGTCAGCTGGTGT |
| 15 | > coGAAAA GAA nucleic acid |
| | ATGGGTGTTAGGCATCCACCATGTTCTCATAGGCTTTTAGCTGTGTGTGCTTTGGTATCACTGGCAACTGCTGCACTTTTAGGTCATATTCTACTACATGATTTTCTACTAGTACCAAGGGAGTTATCTGGTTCTTCTCCAGTTT |
| | TGGAGGAGACTCATCCTGCTCATCAGCAGGGTGCATCAAGGCCAGGTCCTAGAGATGCACAGGCACATCCTGGTAGGCCAAGGGCAGTTCCAACACAGTGTGATGTGCCACCAAATTCAAGGTTTGATTGTGCTCCTGATAAAGC |
| | TATAACACAGGAACAGTGTGAGGCTAGGGGATGTTGTTATATACCAGCTAAACAAGGTCTTCAGGGAGCTCAAATGGGACAGCCTTGGTGTTTTTTTCCTCCTTCATATCCTTCATATAAATTGGAAAATCTGAGTTCATCTGAG |
| | ATGGGTTATACTGCAACATTGACTAGAACTACACCAACATTTTTTCCTAAAGATATATTGACACTAAGATTAGATGTGATGATGGAAACTGAAAATAGACTTCATTTTACAATTAAAGATCCAGCTAATAGAAGGTATGAGGTTC |
| | CATTAGAGACACCTAGGGTGCATTCTAGAGCTCCTAGTCCTTTGTATAGTGTTGAGTTTAGTGAGGAACCATTTGGTGTTATAGTGCATAGACAGCTGGATGGTAGAGTTCTTCTTAATACAACAGTGGCTCCTCTATTTTTTGC |
| | TGATCAATTTTTGCAATTGAGTACTTCTTTGCCATCTCAGTATATAACTGGTTTAGCAGAACATTTGAGTCCTTTGATGCTTTCTACATCTTGGACAAGGATAACATTATGGAATAGGGATCTTGCTCCTACACCTGGTGCAAAT |
| | CTGTATGGTTCTCATCCATTTTATCTTGCTTTAGAGGATGGTGGAAGTGCTCATGGTGTGTTTTTGTTGAATTCTAATGCTATGGATGTAGTGCTTCAACCATCACCAGCTCTTAGTTGGAGATCAACAGGTGGAATACTGGATG |
| | TATATATATTTTTAGGTCCAGAACCTAAATCTGTGGTGCAGCAATATTTAGATGTAGTGGGTTATCCTTTTATGCCACCTTATTGGGGTCTTGGATTTCATCTTTGTAGGTGGGGTTATTCTTCAACTGCAATTACAAGACAGGT |
| | AGTGGAGAATATGACTAGAGCTCATTTTCCACTGGATGTGCAGTGGAATGATTTAGATTATATGGATTCTAGGAGGGATTTTACTTTTAATAAAGATGGTTTTAGAGATTTTCCTGCAATGGTGCAGGAACTTCATCAGGGTGGT |
| | AGAAGGTATATGATGATTGTGGATCCTGCTATATCAAGTTCTGGTCCTGCAGGAAGTTATAGGCCTTATGATGAAGGTCTTAGGAGGGGTGTTTTTATAACAAATGAGACTGGTCAGCCTCTGATTGGAAAAGTGTGGCCTGGAT |
| | CAACAGCTTTTCCTGATTTTACAAATCCTACTGCTTTAGCTTGGTGGGAGGATATGGTTGCAGAATTTCATGATCAGGTGCCTTTTGATGGTATGTGGATAGATATGAATGAACCATCTAATTTTATAAGAGGATCTGAGGATGG |
| | TTGTCCTAATAATGAACTGGAGAATCCTCCATATGTTCCTGGTGTAGTGGGTGGAACATTGCAGGCTGCAACTATATGTGCATCATCACATCAGTTTCTAAGTACTCATTATAATCTTCATAATTTGTATGGTTTGACAGAAGCA |
| | ATAGCATCTCATAGAGCATTGGTGAAAGCTAGGGGTACAAGACCATTTGTGATTTCAAGGTCTACATTTGCAGGACATGGTAGATATGCTGGACATTGGACAGGAGATGTGTGGAGTTCATGGGAGCAGCTAGCAAGTAGTGTGC |
| | CAGAAATATTGCAGTTTAATCTGTTAGGAGTTCCACTTGTGGGTGCTGATGTTTGTGGTTTTTTAGGTAATACAAGTGAAGAGCTGTGTGTGAGATGGACTCAGCTTGGTGCTTTTTATCCATTTATGAGAAATCATAATAGTCT |
| | ACTTTCTCTTCCACAGGAACCATATAGTTTTTCTGAGCCTGCTCAGCAAGCAATGAGGAAAGCACTTACTCTGAGGTATGCTCTTCTGCCACATCTTTATACACTTTTTCATCAGGCACATGTAGCTGGAGAGACAGTGGCAAGG |
| | CCACTATTTTTGGAATTTCCTAAAGATTCAAGTACATGGACAGTGGATCATCAGTTGTTGTGGGGTGAAGCTTTACTTATTACACCAGTTCTGCAAGCAGGTAAAGCAGAGGTGACAGGTTATTTTCCACTGGGTACTTGGTATG |
| | ATCTGCAGACAGTGCCAATAGAAGCTCTGGGTAGTTTGCCACCTCCACCTGCTGCTCCTAGAGAACCTGCTATACATAGTGAGGGTCAGTGGGTAACACTACCAGCACCATTGGATACAATTAATGTGCATTTGAGGGCTGGATA |
| | TATAATACCTTTGCAAGGTCCTGGTTTAACAACTACAGAGTCTAGGCAGCAGCCAATGGCACTTGCTGTGGCACTGACAAAAGGTGGAGAAGCAAGGGGTGAGCTATTTTGGGATGATGGAGAATCTCTTGAAGTGTTAGAAAGG |
| | GGTGCATATACTCAGGTAATTTTTTTGGCTAGGAATAATACAATAGTGAATGAGCTGGTAAGAGTAACATCTGAAGGAGCAGGTCTGCAGTTACAGAAAGTAACTGTGCTAGGAGTAGCTACTGCACCACAGCAGGTATTGTCTA |
| | ATGGAGTACCTGTGTCTAATTTTACTTATAGTCCAGATACAAAAGTGTTAGATATTTGTGTGTCTTTGCTGATGGGAGAGCAGTTTCTTGTGTCATGGTGT |
| 16 | > coGAA GAA nucleic acid |
| | ATGGGAGTTAGGCATCCTCCATGTTCTCATAGGCTGTTGGCAGTATGTGCTCTTGTGTCACTGGCTACTGCTGCTTTACTGGGGCATATACTGCTGCATGATTTTTTACTTGTGCCTAGGGAGCTGTCTGGATCTTCTCCTGTAC |
| | TAGAGGAGACACATCCTGCTCATCAGCAAGGTGCATCAAGGCCAGGACCAAGAGATGCTCAGGCTCATCCTGGAAGGCCTAGAGCAGTGCCAACACAATGTGATGTTCCTCCTAATTCAAGATTTGATTGTGCACCTGATAAAGC |
| | TATAACACAAGAACAGTGTGAGGCTAGGGGTTGTTGTTATATTCCTGCAAAACAAGGGTTGCAAGGGGCACAGATGGGACAACCTTGGTGTTTCTTCCCACCATCTTATCCTAGTTATAAATTGGAGAATTTGTCTTCAAGTGAA |
| | ATGGGGTATACAGCTACATTGACAAGAACAACTCCAACATTTTTTCCAAAGGATATTCTTACTTTGAGGCTAGATGTGATGATGGAGACAGAGAATAGGTTGCATTTTACTATAAAAGATCCAGCTAATAGAAGATATGAGGTTC |
| | CTTTAGAGACTCCAAGGGTGCATTCTAGAGCTCCTTCTCCTTTGTATAGTGTGGAGTTTTCAGAGGAACCATTTGGTGTTATTGTTCATAGACAGCTGGATGGTAGGGTGCTGTTGAATACTACAGTAGCTCCTCTGTTTTTTGC |
| | TGATCAGTTTTTACAGTTGTCAACTAGTCTTCCAAGTCAGTATATTACAGGTTTGGCAGAGCATCTATCTCCATTGATGCTGTCTACAAGTTGGACAAGAATAACACTTTGGAATAGAGATCTAGCACCTACACCTGGAGCTAAT |
| | TTGTATGGATCACATCCATTTTATTTGGCATTGGAAGATGGAGGGTCTGCTCATGGAGTTTTTTTATTGAATAGTAATGCTATGGATGTAGTGCTGCAGCCTTCTCCAGCACTAAGTTGGAGATCTACTGGTGGAATTCTTGATG |
| | TTTATATATTTTTAGGGCCTGAACCTAAGTCTGTGGTGCAGCAATATTTAGATGTAGTTGGATATCCTTTTATGCCTCCTTATTGGGGACTTGGTTTTCATCTTTGTAGATGGGGTTATAGTTCTACTGCAATAACAAGGCAGGT |
| | GGTGGAGAATATGACAAGAGCACATTTTCCACTTGATGTGCAATGGAATGATTTAGATTATATGGATTCTAGAAGAGATTTTACTTTTAATAAGGATGGGTTTAGAGATTTTCCAGCTATGGTACAGGAATTGCATCAGGGTGGA |
| | AGAAGGTATATGATGATAGTGGATCCAGCTATTTCTAGTTCTGGTCCTGCTGGGTCTTATAGGCCATATGATGAGGGGCTGAGAAGAGGAGTGTTTATTACAAATGAAACAGGGCAACCTCTAATTGGGAAAGTGTGGCCTGGGA |
| | GTACTGCTTTTCCAGATTTTACAAATCCAACAGCACTTGCATGGTGGGAGGATATGGTGGCAGAGTTTCATGATCAAGTTCCTTTTGATGGGATGTGGATAGATATGAATGAGCCATCAAATTTTATAAGGGGTTCTGAGGATGG |
| | TTGTCCAAATAATGAGTTGGAGAATCCACCTTATGTGCCAGGTGTAGTGGGTGGAACACTGCAGGCAGCAACTATTTGTGCATCATCTCATCAGTTTCTTAGTACTCATTATAATCTACATAATTTGTATGGTTTGACAGAGGCA |
| | ATAGCTTCTCATAGGGCTTTGGTGAAGGCTAGAGGTACAAGACCTTTTGTGATTTCTAGAAGTACTTTTGCAGGGCATGGTAGATATGCTGGACATTGGACAGGGGATGTATGGTCTTCTTGGGAGCAACTAGCTTCATCTGTAC |
| | CTGAGATATTGCAGTTTAATTTGCTAGGAGTGCCACTTGTGGGAGCTGATGTGTGTGGTTTCCTGGGTAATACTAGTGAGGAGCTGTGTGTGAGATGGACACAGCTAGGTGCTTTTTATCCATTTATGAGGAATCATAATTCTCT |
| | GCTGTCACTGCCACAAGAACCATATTCATTTTCTGAACCTGCACAGCAAGCTATGAGAAAGGCATTGACTCTTAGATATGCACTGTTACCTCATCTATATACACTGTTTCATCAGGCTCATGTAGCAGGTGAAACAGTGGCAAGG |
| | CCACTTTTCCTGGAGTTCCCAAAGGATTCTTCTACTTGGACAGTGGATCATCAGCTATTGTGGGGTGAGGCATTATTGATTACTCCTGTGCTTCAAGCTGGAAAAGCAGAGGTGACAGGATATTTCCCTTTAGGAACTTGGTATG |
| | ATCTGCAGACTGTGCCTATAGAGGCACTGGGTTCATTGCCTCCACCACCTGCTGCACCTAGGGAACCTGCAATTCATTCTGAGGGTCAGTGGGTGACATTGCCAGCACCTCTTGATACAATTAATGTGCATTTGAGAGCTGGTTA |
| | TATTATACCTCTGCAGGGTCCTGGGTTGACTACTACTGAATCAAGACAGCAGCCTATGGCTCTGGCAGTGGCACTGACTAAGGGAGGTGAAGCAAGAGGTGAACTTTTTTGGGATGATGGAGAGTCATTAGAAGTACTTGAAAGA |
| | GGGGCATATACTCAGGTGATTTTCTTGGCTAGGAATAATACAATTGTGAATGAACTTGTGAGGGTGACATCAGAGGGAGCAGGTCTGCAGCTTCAGAAGGTGACAGTGCTTGGAGTTGCTACAGCTCCACAGCAAGTTTTAAGTA |
| | ATGGAGTACCTGTGTCTAATTTTACATATAGTCCAGATACAAAAGTGCTGGATATTTGTGTGAGTTTGTTGATGGGTGAGCAATTTCTAGTGAGTTGGTGT |
| 17 | > coGAA GAA nucleic acid |
| | ATGGGTGTTAGGCATCCACCATGTAGTCATAGGCTGCTGGCAGTTTGTGCACTGGTTAGTCTGGCAACTGCAGCACTGCTGGGTCATATTCTGCTGCATGATTTTCTGCTGGTTCCAAGGGAACTGAGTGGTAGTAGTCCAGTTC |
| | TGGAAGAAACTCATCCAGCACATCAACAAGGTGCAAGTAGGCCAGGTCCAAGGGATGCACAAGCACATCCAGGTAGGCCAAGGGCAGTTCCAACTCAATGTGATGTTCCACCAAATAGTAGGTTTGATTGTGCACCAGATAAAGC |
| | AATAACTCAAGAACAATGTGAAGCAAGGGGTTGTTGTTATATTCCAGCAAAACAAGGTCTGCAAGGTGCACAAATGGGTCAACCATGGTGTTTTTTTCCACCAAGTTATCCAAGTTATAAACTGGAAAATCTGAGTAGTAGTGAA |
| | ATGGGTTATACTGCAACTCTGACTAGGACTACTCCAACTTTTTTTCCAAAAGATATTCTGACTCTGAGGCTGGATGTTATGATGGAAACTGAAAATAGGCTGCATTTTACTATTAAAGATCCAGCAAATAGGAGGTATGAAGTTC |
| | CACTGGAAACTCCAAGGGTTCATAGTAGGGCACCAAGTCCACTGTATAGTGTAGAATTTAGTGAAGAACCATTTGGTGTTATTGTTCATAGGCAACTGGATGGTAGGGTTCTGCTGAATACTACTGTTGCACCACTGTTTTTTGC |
| | AGATCAATTTCTGCAACTGAGTACTAGTCTGCCAAGTCAATATATTACTGGTCTGGCAGAACATCTGAGTCCACTGATGCTGAGTACTAGTTGGACTAGGATTACTCTGTGGAATAGGGATCTGGCACCAACTCCAGGTGCAAAT |
| | CTGTATGGTAGTCATCCATTTTATCTGGCACTGGAAGATGGTGGTAGTGCACATGGTGTTTTTCTGCTGAATAGTAATGCAATGGATGTTGTTCTGCAACCAAGTCCAGCACTGAGTTGGAGGAGTACTGGTGGTATTCTGGATG |
| | TTTATATTTTTCTAGGTCCAGAACCAAAAAGTGTTGTTCAACAATATCTGGATGTAGTTGGTTATCCATTTATGCCACCATATTGGGGTCTGGGTTTTCATCTGTGTAGGTGGGGTTATAGTAGTACTGCAATTACTAGGCAAGT |
| | TGTTGAAAATATGACTAGGGCACATTTTCCACTGGATGTTCAATGGAATGATCTAGATTATATGGATAGTAGGAGGGATTTTACTTTTAATAAAGATGGTTTTAGGGATTTTCCAGCAATGGTTCAAGAACTGCATCAAGGTGGT |
| | AGGAGGTATATGATGATTGTTGATCCAGCAATTAGTAGTAGTGGTCCAGCAGGTAGTTATAGGCCATATGATGAAGGTCTGAGGAGGGGTGTTTTTATTACTAATGAAACTGGTCAACCACTGATTGGTAAAGTTTGGCCAGGTA |
| | GTACTGCATTTCCAGATTTTACTAATCCAACTGCACTGGCATGGTGGGAAGATATGGTTGCAGAATTTCATGATCAAGTTCCATTTGATGGTATGTGGATTGATATGAATGAACCAAGTAATTTTATAAGGGGTAGTGAAGATGG |
| | TTGTCCAAATAATGAACTAGAAAATCCACCATATGTTCCAGGTGTTGTTGGTGGTACTCTGCAAGCAGCAACTATTTGTGCAAGTAGTCATCAATTTCTGAGTACTCATTATAATCTGCATAATCTGTATGGTCTGACTGAAGCA |
| | ATTGCAAGTCATAGGGCACTGGTTAAAGCAAGGGGTACTAGGCCATTTGTTATTAGTAGGAGTACTTTTGCAGGTCATGGTAGGTATGCAGGTCATTGGACTGGTGATGTTTGGAGTAGTTGGGAACAACTAGCAAGTAGTGTTC |
| | CAGAAATTCTGCAATTTAATCTGCTGGGTGTTCCACTGGTTGGTGCAGATGTTTGTGGTTTTCTAGGTAATACTAGTGAAGAACTGTGTGTTAGGTGGACTCAACTGGGTGCATTTTATCCATTTATGAGGAATCATAATAGTCT |
| | GCTGAGTCTGCCACAAGAACCATATAGTTTTAGTGAACCAGCACAACAAGCAATGAGGAAAGCACTGACTCTGAGGTATGCACTGCTGCCACATCTGTATACTCTGTTTCATCAAGCACATGTAGCAGGTGAAACTGTTGCAAGG |
| | CCACTGTTTCTGGAATTTCCAAAAGATAGTAGTACTTGGACTGTTGATCATCAACTGCTGTGGGGTGAAGCACTGCTGATTACTCCAGTTCTGCAAGCAGGTAAAGCAGAAGTTACTGGTTATTTTCCACTGGGTACTTGGTATG |
| | ATCTGCAAACTGTTCCAATAGAAGCACTGGGTAGTCTGCCACCACCACCAGCAGCACCAAGGGAACCAGCAATTCATAGTGAAGGTCAATGGGTTACTCTGCCAGCACCACTGGATACTATTAATGTTCATCTGAGGGCAGGTTA |
| | TATTATTCCACTGCAAGGTCCAGGTCTGACTACTACTGAAAGTAGGCAACAACCAATGGCACTGGCAGTTGCACTGACTAAAGGTGGTGAAGCAAGGGGTGAACTGTTTTGGGATGATGGTGAAAGTCTAGAAGTTCTGGAAAGG |
| | GGTGCATATACTCAAGTTATTTTTCTGGCAAGGAATAATACTATTGTTAATGAACTAGTTAGGGTTACTAGTGAAGGTGCAGGTCTGCAACTGCAAAAAGTTACTGTTCTGGGTGTTGCAACTGCACCACAACAAGTTCTGAGTA |
| | ATGGTGTTCCAGTTAGTAATTTTACTTATAGTCCAGATACTAAAGTTCTGGATATTTGTGTTAGTCTGCTGATGGGTGAACAATTTCTGGTTAGTTGGTGT |
| 18 | > coGAA GAA nucleic acid |
| | ATGGGTGTAAGGCATCCTCCATGTAGTCATAGGCTGTTAGCTGTATGTGCACTGGTTAGTCTTGCTACAGCTGCTTTGCTGGGACATATACTACTTCATGATTTTCTGCTGGTGCCAAGAGAGCTAAGTGGGTCTTCACCTGTAT |
| | TGGAGGAGACACATCCAGCACATCAGCAGGGGGCTAGTAGGCCTGGGCCAAGGGATGCACAAGCTCATCCAGGGAGACCTAGAGCAGTTCCAACACAATGTGATGTACCTCCTAATTCAAGGTTTGATTGTGCACCTGATAAAGC |
| | TATAACTCAGGAGCAATGTGAGGCTAGAGGTTGTTGTTATATTCCTGCTAAACAAGGGTTACAAGGGGCTCAAATGGGGCAACCTTGGTGTTTTTTTCCACCAAGTTATCCATCATATAAACTTGAGAATCTGTCTTCAAGTGAA |
| | ATGGGGTATACTGCAACTTTAACAAGGACAACACCAACTTTTTTTCCAAAAGATATTCTGACTCTTAGGCTTGATGTGATGATGGAAACAGAGAATAGGCTGCATTTTACAATTAAAGATCCAGCAAATAGGAGATATGAAGTAC |
| | CTCTAGAAACTCCTAGGGTACATAGTAGAGCACCATCACCACTTTATTCAGTTGAATTTAGTGAAGAACCTTTTGGGGTAATAGTGCATAGACAGTTAGATGGGAGAGTACTTCTGAATACTACTGTTGCTCCTTTGTTTTTTGC |
| | AGATCAGTTTCTTCAACTTTCAACTAGTCTTCCAAGTCAATATATAACTGGTCTTGCTGAGCATTTGAGTCCTCTTATGTTGAGTACATCTTGGACTAGGATTACTCTTTGGAATAGGGATCTGGCACCAACTCCTGGGGCAAAT |
| | TTATATGGATCTCATCCATTTTATTTGGCTTTGGAAGATGGAGGAAGTGCTCATGGAGTATTTTTGTTAAATAGTAATGCTATGGATGTAGTTCTACAGCCTTCTCCTGCTCTGTCATGGAGATCAACAGGTGGGATTTTGGATG |
| | TATATATTTTTTTGGGACCTGAACCTAAGAGTGTTGTGCAACAGTATCTTGATGTTGTAGGGTATCCATTTATGCCACCATATTGGGGGCTTGGATTTCATCTGTGTAGATGGGGATACAGTTCAACTGCTATAACTAGACAGGT |
| | TGTGGAAAATATGACTAGAGCACATTTTCCTTTAGATGTGCAGTGGAATGATCTAGATTACATGGATAGTAGAAGAGATTTTACTTTTAATAAGGATGGGTTTAGAGATTTTCCAGCAATGGTACAGGAACTGCATCAAGGGGGA |
| | AGGAGGTATATGATGATTGTTGACCCTGCAATTAGTAGTTCTGGTCCAGCAGGATCTTATAGACCTTATGATGAGGGGCTTAGGAGGGGTGTATTTATTACAAATGAAACAGGGCAACCATTAATTGGTAAGGTGTGGCCTGGTA |
| | GTACAGCTTTTCCTGATTTTACAAATCCAACAGCACTGGCTTGGTGGGAAGATATGGTGGCAGAATTTCATGATCAAGTGCCTTTTGATGGGATGTGGATTGATATGAATGAGCCAAGTAATTTTATAAGGGGATCTGAGGATGG |
| | ATGTCCAAATAATGAGCTTGAGAATCCTCCTTATGTTCCAGGAGTTGTAGGAGGGACACTGCAAGCAGCAACAATTTGTGCTAGTTCACATCAATTTCTGAGTACACATTATAATTTGCATAATCTGTATGGTTTAACAGAGGCA |
| | ATTGCAAGTCATAGGGCATTAGTGAAAGCAAGAGGTACTAGGCCATTTGTGATTTCTAGGAGTACTTTTGCAGGGCATGGTAGATATGCTGGGCATTGGACAGGAGATGTTTGGAGTAGTTGGGAACAACTAGCATCTTCTGTAC |
| | CTGAGATTCTACAATTTAATCTTCTGGGAGTACCTTTAGTGGGTGCAGATGTATGTGGTTTTCTGGGGAATACTAGTGAGGAATTGTGTGTAAGGTGGACTCAATTAGGAGCATTTTATCCTTTTATGAGGAATCATAATAGTTT |
| | ATTAAGTCTTCCTCAAGAGCCATATTCTTTTTCAGAACCTGCACAGCAAGCAATGAGAAAAGCTCTTACTCTGAGGTATGCATTGCTGCCACATCTGTATACTTTATTTCATCAAGCTCATGTGGCTGGGGAAACTGTAGCAAGA |
| | CCTCTGTTTTTAGAGTTTCCAAAGGATTCTAGTACTTGGACAGTGGATCATCAACTACTTTGGGGTGAGGCTCTGCTTATAACTCCTGTTTTGCAGGCAGGGAAGGCAGAGGTGACTGGTTATTTTCCACTGGGAACATGGTATG |
| | ACCTTCAAACAGTGCCAATAGAAGCACTTGGAAGTCTTCCACCTCCTCCAGCTGCTCCTAGGGAGCCTGCTATACATAGTGAAGGACAATGGGTTACATTACCTGCACCATTAGATACTATTAATGTGCATCTGAGAGCAGGGTA |
| | TATTATTCCTCTGCAAGGGCCAGGACTGACTACTACTGAAAGTAGGCAACAACCAATGGCACTTGCAGTTGCTCTGACAAAAGGTGGTGAAGCAAGAGGTGAGCTTTTTTGGGATGATGGAGAATCATTGGAGGTTCTGGAAAGA |
| | GGGGCATATACTCAGGTTATATTCCTAGCTAGGAACAATACAATAGTTAATGAGTTAGTGAGGGTGACAAGTGAGGGTGCTGGACTTCAATTACAAAAAGTTACTGTTCTGGGTGTAGCAACAGCACCTCAACAGGTTTTGAGTA |
| | ATGGGGTGCCTGTAAGTAATTTTACATACAGTCCAGATACTAAGGTGCTTGATATTTGTGTTAGTTTGCTGATGGGAGAACAATTTTTGGTAAGTTGGTGC |
| 19 | > coGAA GAA nucleic acid w/o signal peptide |
| | GGCCATATCCTGCTGCATGACTTCCTGCTGGTGCCTAGGGAGCTGTCTGGCAGCAGCCCTGTGCTGGAAGAGACCCACCCTGCTCACCAGCAGGGGGCC |
| | AGCAGGCCAGGCCCCAGGGATGCCCAGGCCCACCCTGGCAGACCCAGGGCTGTGCCCACCCAGTGTGATGTGCCTCCCAACAGCAGATTTGACTGTGCCCCTGATAAGGCCATTACTCAG |
| | GAACAGTGTGAGGCCAGGGGCTGCTGCTATATCCCTGCCAAGCAGGGCCTGCAGGGGGCCCAGATGGGGCAGCCCTGGTGCTTCTTCCCCCCCAGCTACCCCTCTTATAAGCTGGAGAAT |
| | CTGAGCAGCTCTGAAATGGGCTACACTGCCACTCTGACCAGGACTACCCCCACCTTCTTCCCCAAGGATATTCTGACTCTGAGGCTGGATGTGATGATGGAGACTGAGAACAGGCTGCAC |
| | TTCACCATCAAGGACCCTGCCAACAGGAGGTATGAGGTGCCCCTGGAAACTCCCAGGGTGCACTCTAGGGCCCCCAGCCCCCTGTATTCTGTGGAGTTCTCTGAGGAGCCTTTTGGGGTC |
| | ATTGTCCACAGGCAGCTGGATGGCAGGGTGCTGCTGAATACTACTGTGGCCCCTCTGTTCTTTGCTGACCAGTTCCTGCAGCTGAGCACCAGCCTGCCTTCTCAGTACATTACTGGCCTG |
| | GCTGAGCATCTGAGCCCCCTGATGCTGAGCACCTCTTGGACCAGAATCACCCTGTGGAACAGGGACCTGGCTCCCACTCCTGGGGCCAACCTGTATGGCAGCCACCCCTTCTACCTGGCC |
| | CTGGAGGATGGGGGCTCTGCCCATGGGGTGTTCCTGCTGAACAGCAATGCCATGGATGTGGTGCTGCAGCCCTCTCCTGCCCTGTCTTGGAGATCTACTGGGGGCATCCTGGATGTGTAT |
| | ATCTTCCTGGGGCCTGAGCCCAAGTCTGTGGTGCAGCAGTACCTGGATGTGGTGGGCTACCCCTTCATGCCCCCCTACTGGGGCCTGGGCTTCCACCTGTGCAGGTGGGGCTACTCTTCT |
| | ACTGCTATCACCAGGCAGGTGGTGGAGAACATGACCAGGGCTCACTTCCCTCTGGATGTGCAGTGGAATGACCTGGACTACATGGACTCTAGGAGAGACTTCACTTTTAATAAGGATGGG |
| | TTCAGGGACTTTCCTGCCATGGTGCAGGAGCTGCATCAGGGGGGCAGGAGATATATGATGATTGTGGACCCTGCTATTTCTAGCTCTGGCCCTGCTGGCAGCTATAGGCCCTATGATGAG |
| | GGGCTGAGGAGGGGGGTGTTCATCACTAATGAGACTGGCCAGCCCCTGATTGGCAAGGTGTGGCCTGGCTCTACTGCCTTCCCTGATTTCACCAACCCCACTGCCCTGGCCTGGTGGGAG |
| | GATATGGTGGCTGAGTTTCATGACCAGGTGCCCTTTGATGGCATGTGGATTGACATGAATGAGCCCAGCAACTTTATCAGGGGCTCTGAAGATGGCTGCCCCAACAATGAGCTGGAGAAC |
| | CCCCCCTATGTGCCTGGGGTGGTGGGGGGCACCCTGCAGGCTGCCACCATCTGTGCCAGCAGCCACCAGTTCCTGAGCACCCACTATAACCTGCACAACCTGTATGGCCTGACTGAGGCC |
| | ATTGCCTCTCACAGGGCCCTGGTGAAGGCTAGGGGGACTAGGCCCTTTGTGATCAGCAGGTCTACTTTTGCTGGCCATGGCAGGTATGCTGGGCACTGGACTGGGGATGTGTGGTCTAGC |
| | TGGGAGCAGCTGGCCAGCTCTGTGCCTGAGATCCTGCAGTTTAATCTGCTGGGGGTGCCCCTGGTGGGGGCTGATGTGTGTGGCTTCCTGGGCAATACCTCTGAGGAGCTGTGTGTGAGG |
| | TGGACTCAGCTGGGGGCTTTCTACCCCTTCATGAGAAACCACAACTCTCTGCTGAGCCTGCCCCAGGAGCCCTATTCTTTTTCTGAGCCTGCCCAGCAGGCTATGAGGAAGGCCCTGACT |
| | CTGAGGTATGCCCTGCTGCCCCACCTGTATACCCTGTTCCATCAGGCCCATGTGGCTGGGGAGACTGTGGCCAGACCTCTGTTCCTGGAGTTCCCCAAGGATAGCTCTACTTGGACTGTG |
| | GACCACCAGCTGCTGTGGGGGGAGGCTCTGCTGATCACCCCTGTGCTGCAGGCTGGGAAGGCTGAGGTGACTGGCTATTTCCCCCTGGGCACCTGGTATGATCTGCAGACTGTGCCCATT |
| | GAGGCCCTGGGCTCTCTGCCCCCTCCCCCTGCTGCCCCCAGGGAGCCTGCCATCCACTCTGAGGGCCAGTGGGTGACCCTGCCTGCCCCTCTGGACACTATCAATGTGCACCTGAGGGCT |
| | GGCTACATCATCCCCCTGCAGGGCCCTGGCCTGACTACCACTGAGTCTAGGCAGCAGCCCATGGCCCTGGCTGTGGCTCTGACCAAGGGGGGGGAGGCCAGGGGGGAGCTGTTCTGGGAT |
| | GATGGGGAGTCTCTGGAGGTGCTGGAGAGGGGGGCCTACACCCAGGTGATCTTCCTGGCTAGGAATAACACCATTGTCAATGAGCTGGTGAGGGTGACCTCTGAGGGGGCTGGCCTGCAG |
| | CTGCAGAAGGTGACTGTGCTGGGGGTGGCTACTGCCCCCCAGCAGGTGCTGAGCAATGGGGTGCCTGTGAGCAACTTCACCTATAGCCCTGACACCAAGGTGCTGGACATCTGTGTGAGC |
| | CTGCTGATGGGGGAGCAGTTCCTGGTGAGCTGGTGCTAA |
| 20 | > coGAA GAA nucleic acid w/o signal peptide |
| | GGACATATTCTGCTGCATGATTTTCTGCTAGTGCCTAGAGAGCTGTCTGGATCTTCTCCTGTGCTGGAGGAGACACATCCTGCTCATCAGCAGGGAGCT |
| | TCTAGACCTGGACCTAGAGATGCTCAGGCTCATCCTGGAAGACCTAGAGCTGTGCCTACACAGTGTGATGTGCCTCCTAATTCTAGATTTGATTGTGCTCCTGATAAGGCTATAACACAG |
| | GAGCAGTGTGAGGCTAGAGGATGTTGTTATATTCCTGCTAAGCAGGGACTGCAGGGAGCTCAGATGGGACAGCCTTGGTGTTTTTTTCCTCCTTCTTATCCTTCTTATAAGCTGGAGAAT |
| | CTGTCTTCTTCTGAGATGGGATATACAGCTACACTGACAAGAACAACACCTACATTTTTTCCTAAGGATATTCTGACACTGAGACTGGATGTGATGATGGAGACAGAGAATAGACTGCAT |
| | TTTACAATTAAGGATCCTGCTAATAGAAGATATGAGGTGCCTCTAGAGACACCTAGAGTGCATTCTAGAGCTCCTTCTCCTCTGTATTCTGTGGAGTTTTCTGAGGAGCCTTTTGGAGTG |
| | ATTGTGCATAGACAGCTGGATGGAAGAGTGCTGCTGAATACAACAGTGGCTCCTCTGTTTTTTGCTGATCAGTTTCTGCAGCTGTCTACATCTCTGCCTTCTCAGTATATTACAGGACTG |
| | GCTGAGCATCTGTCTCCTCTGATGCTGTCTACATCTTGGACAAGAATTACACTGTGGAATAGAGATCTGGCTCCTACACCTGGAGCTAATCTGTATGGATCTCATCCTTTTTATCTGGCT |
| | CTGGAGGATGGAGGATCTGCTCATGGAGTGTTTCTGCTGAATTCTAATGCTATGGATGTAGTGCTGCAGCCTTCTCCTGCTCTGTCTTGGAGATCTACAGGAGGAATTCTGGATGTGTAT |
| | ATTTTTCTAGGACCTGAGCCTAAGTCTGTGGTGCAGCAGTATCTGGATGTAGTGGGATATCCTTTTATGCCTCCTTATTGGGGACTGGGATTTCATCTGTGTAGATGGGGATATTCTTCT |
| | ACAGCTATTACAAGACAGGTGGTTGAGAATATGACAAGAGCTCATTTTCCTCTGGATGTGCAGTGGAATGATCTAGATTATATGGATTCTAGAAGAGATTTTACATTTAATAAGGATGGA |
| | TTTAGAGATTTTCCTGCTATGGTGCAGGAGCTGCATCAGGGAGGAAGAAGATATATGATGATTGTGGATCCTGCTATTTCTTCTTCTGGACCTGCTGGATCTTATAGACCTTATGATGAG |
| | GGACTGAGAAGAGGAGTGTTTATTACAAATGAGACAGGACAGCCTCTGATTGGAAAGGTGTGGCCTGGATCTACAGCTTTTCCTGATTTTACAAATCCTACAGCTCTGGCTTGGTGGGAG |
| | GATATGGTGGCTGAGTTTCATGATCAGGTGCCTTTTGATGGAATGTGGATTGATATGAATGAGCCTTCTAATTTTATAAGAGGATCTGAGGATGGATGTCCTAATAATGAGCTAGAGAAT |
| | CCTCCTTATGTGCCTGGAGTAGTGGGAGGAACACTGCAGGCTGCTACAATTTGTGCTTCTTCTCATCAGTTTCTGTCTACACATTATAATCTGCATAATCTGTATGGACTGACAGAGGCT |
| | ATTGCTTCTCATAGAGCTCTGGTGAAGGCTAGAGGAACAAGACCTTTTGTGATTTCTAGATCTACATTTGCTGGACATGGAAGATATGCTGGACATTGGACAGGAGATGTATGGTCTTCT |
| | TGGGAGCAGCTAGCTTCTTCTGTGCCTGAGATTCTGCAGTTTAATCTGCTAGGAGTGCCTCTGGTGGGAGCTGATGTGTGTGGATTTCTGGGAAATACATCTGAGGAGCTGTGTGTGAGA |
| | TGGACACAGCTGGGAGCTTTTTATCCTTTTATGAGAAATCATAATTCTCTGCTGTCTCTGCCTCAGGAGCCTTATTCTTTTTCTGAGCCTGCTCAGCAGGCTATGAGAAAGGCTCTGACA |
| | CTGAGATATGCTCTGCTGCCTCATCTGTATACACTGTTTCATCAGGCTCATGTGGCTGGAGAGACAGTAGCTAGACCTCTGTTTCTGGAGTTTCCTAAGGATTCTTCTACATGGACAGTT |
| | GATCATCAGCTGCTGTGGGGAGAGGCTCTGCTGATTACACCTGTGCTGCAGGCTGGAAAGGCTGAGGTGACAGGATATTTTCCTCTGGGAACATGGTATGATCTGCAGACAGTGCCTATA |
| | GAGGCTCTGGGATCTCTGCCTCCTCCTCCTGCTGCTCCTAGAGAGCCTGCTATTCATTCTGAGGGACAGTGGGTGACACTGCCTGCTCCTCTGGATACAATTAATGTGCATCTGAGAGCT |
| | GGATATATTATTCCTCTGCAGGGACCTGGACTGACAACAACAGAGTCTAGACAGCAGCCTATGGCTCTGGCTGTGGCTCTGACAAAGGGAGGAGAGGCTAGAGGAGAGCTGTTTTGGGAT |
| | GATGGAGAGTCTCTGGAGGTGCTGGAGAGAGGAGCTTATACACAGGTGATTTTTCTGGCTAGAAATAATACAATTGTGAATGAGCTGGTGAGAGTGACATCTGAGGGAGCTGGACTGCAG |
| | CTGCAGAAGGTGACAGTGCTGGGAGTGGCTACAGCTCCTCAGCAGGTGCTGTCTAATGGAGTGCCTGTGTCTAATTTTACATATTCTCCTGATACAAAGGTGCTGGATATTTGTGTGTCT |
| | CTGCTGATGGGAGAGCAGTTTCTGGTGTCTTGGTGT |
| 21 | > coGAA GAA nucleic acid |
| | CAGCAGGGG GCCAGCAGGC CAGGCCCCAG GGATGCCCAG GCCCACCCTG GCAGACCCAG GGCTGTGCCC ACCCAGTGTG ATGTGCCTCC CAACAGCAGA TTTGACTGTG CCCCTGATAA GGCCATTACT |
| | CAGGAACAGT GTGAGGCCAG GGGCTGCTGC TATATCCCTG CCAAGCAGGG CCTGCAGGGG GCCCAGATGG GGCAGCCCTG GTGCTTCTTC CCCCCCAGCT ACCCCTCTTA TAAGCTGGAG |
| | AATCTGAGCA GCTCTGAAAT GGGCTACACT GCCACTCTGA CCAGGACTAC CCCCACCTTC TTCCCCAAGG ATATTCTGAC TCTGAGGCTG GATGTGATGA TGGAGACTGA GAACAGGCTG |
| | CACTTCACCA TCAAGGACCC TGCCAACAGG AGGTATGAGG TGCCCCTGGA AACTCCCAGG GTGCACTCTA GGGCCCCCAG CCCCCTGTAT TCTGTGGAGT TCTCTGAGGA GCCTTTTGGG |
| | GTCATTGTCC ACAGGCAGCT GGATGGCAGG GTGCTGCTGA ATACTACTGT GGCCCCTCTG TTCTTTGCTG ACCAGTTCCT GCAGCTGAGC ACCAGCCTGC CTTCTCAGTA CATTACTGGC |
| | CTGGCTGAGC ATCTGAGCCC CCTGATGCTG AGCACCTCTT GGACCAGAAT CACCCTGTGG AACAGGGACC TGGCTCCCAC TCCTGGGGCC AACCTGTATG GCAGCCACCC CTTCTACCTG |
| | GCCCTGGAGG ATGGGGGCTC TGCCCATGGG GTGTTCCTGC TGAACAGCAA TGCCATGGAT GTGGTGCTGC AGCCCTCTCC TGCCCTGTCT TGGAGATCTA CTGGGGGCAT CCTGGATGTG |
| | TATATCTTCC TGGGGCCTGA GCCCAAGTCT GTGGTGCAGC AGTACCTGGA TGTGGTGGGC TACCCCTTCA TGCCCCCCTA CTGGGGCCTG GGCTTCCACC TGTGCAGGTG GGGCTACTCT |
| | TCTACTGCTA TCACCAGGCA GGTGGTGGAG AACATGACCA GGGCTCACTT CCCTCTGGAT GTGCAGTGGA ATGACCTGGA CTACATGGAC TCTAGGAGAG ACTTCACTTT TAATAAGGAT |
| | GGGTTCAGGG ACTTTCCTGC CATGGTGCAG GAGCTGCATC AGGGGGGCAG GAGATATATG ATGATTGTGG ACCCTGCTAT TTCTAGCTCT GGCCCTGCTG GCAGCTATAG GCCCTATGAT |
| | GAGGGGCTGA GGAGGGGGGT GTTCATCACT AATGAGACTG GCCAGCCCCT GATTGGCAAG GTGTGGCCTG GCTCTACTGC CTTCCCTGAT TTCACCAACC CCACTGCCCT GGCCTGGTGG |
| | GAGGATATGG TGGCTGAGTT TCATGACCAG GTGCCCTTTG ATGGCATGTG GATTGACATG AATGAGCCCA GCAACTTTAT CAGGGGCTCT GAAGATGGCT GCCCCAACAA TGAGCTGGAG |
| | AACCCCCCCT ATGTGCCTGG GGTGGTGGGG GGCACCCTGC AGGCTGCCAC CATCTGTGCC AGCAGCCACC AGTTCCTGAG CACCCACTAT AACCTGCACA ACCTGTATGG CCTGACTGAG |
| | GCCATTGCCT CTCACAGGGC CCTGGTGAAG GCTAGGGGGA CTAGGCCCTT TGTGATCAGC AGGTCTACTT TTGCTGGCCA TGGCAGGTAT GCTGGGCACT GGACTGGGGA TGTGTGGTCT |
| | AGCTGGGAGC AGCTGGCCAG CTCTGTGCCT GAGATCCTGC AGTTTAATCT GCTGGGGGTG CCCCTGGTGG GGGCTGATGT GTGTGGCTTC CTGGGCAATA CCTCTGAGGA GCTGTGTGTG |
| | AGGTGGACTC AGCTGGGGGC TTTCTACCCC TTCATGAGAA ACCACAACTC TCTGCTGAGC CTGCCCCAGG AGCCCTATTC TTTTTCTGAG CCTGCCCAGC AGGCTATGAG GAAGGCCCTG |
| | ACTCTGAGGT ATGCCCTGCT GCCCCACCTG TATACCCTGT TCCATCAGGC CCATGTGGCT GGGGAGACTG TGGCCAGACC TCTGTTCCTG GAGTTCCCCA AGGATAGCTC TACTTGGACT |
| | GTGGACCACC AGCTGCTGTG GGGGGAGGCT CTGCTGATCA CCCCTGTGCT GCAGGCTGGG AAGGCTGAGG TGACTGGCTA TTTCCCCCTG GGCACCTGGT ATGATCTGCA GACTGTGCCC |
| | ATTGAGGCCC TGGGCTCTCT GCCCCCTCCC CCTGCTGCCC CCAGGGAGCC TGCCATCCAC TCTGAGGGCC AGTGGGTGAC CCTGCCTGCC CCTCTGGACA CTATCAATGT GCACCTGAGG |
| | GCTGGCTACA TCATCCCCCT GCAGGGCCCT GGCCTGACTA CCACTGAGTC TAGGCAGCAG CCCATGGCCC TGGCTGTGGC TCTGACCAAG GGGGGGGAGG CCAGGGGGGA GCTGTTCTGG |
| | GATGATGGGG AGTCTCTGGA GGTGCTGGAG AGGGGGGCCT ACACCCAGGT GATCTTCCTG GCTAGGAATA ACACCATTGT CAATGAGCTG GTGAGGGTGA CCTCTGAGGG GGCTGGCCTG |
| | CAGCTGCAGA AGGTGACTGT GCTGGGGGTG GCTACTGCCC CCCAGCAGGT GCTGAGCAAT GGGGTGCCTG TGAGCAACTT CACCTATAGC CCTGACACCA AGGTGCTGGA CATCTGTGTG |
| | AGCCTGCTGA TGGGGGAGCA GTTCCTGGTG AGCTGGTGCT AA |
| 22 | > coGAA GAA nucleic acid w/ hFN1 signal peptide |
| | ATGCTTAGGGGTCCGGGGCCCGGGCTGCTGCTGCTGGCCGTCCAGTGCCTGGGGACAGCGGTGCCCTCCACGGGAGCCTCGAAGAGCAAGAGG |
| | GGCCATATCCTGCTGCATGACTTCCTGCTGGTGCCTAGGGAGCTGTCTGGCAGCAGCCCTGTGCTGGAAGAGACCCACCCTGCTCACCAGCAGGGGGCC |
| | AGCAGGCCAGGCCCCAGGGATGCCCAGGCCCACCCTGGCAGACCCAGGGCTGTGCCCACCCAGTGTGATGTGCCTCCCAACAGCAGATTTGACTGTGCCCCTGATAAGGCCATTACTCAG |
| | GAACAGTGTGAGGCCAGGGGCTGCTGCTATATCCCTGCCAAGCAGGGCCTGCAGGGGGCCCAGATGGGGCAGCCCTGGTGCTTCTTCCCCCCCAGCTACCCCTCTTATAAGCTGGAGAAT |
| | CTGAGCAGCTCTGAAATGGGCTACACTGCCACTCTGACCAGGACTACCCCCACCTTCTTCCCCAAGGATATTCTGACTCTGAGGCTGGATGTGATGATGGAGACTGAGAACAGGCTGCAC |
| | TTCACCATCAAGGACCCTGCCAACAGGAGGTATGAGGTGCCCCTGGAAACTCCCAGGGTGCACTCTAGGGCCCCCAGCCCCCTGTATTCTGTGGAGTTCTCTGAGGAGCCTTTTGGGGTC |
| | ATTGTCCACAGGCAGCTGGATGGCAGGGTGCTGCTGAATACTACTGTGGCCCCTCTGTTCTTTGCTGACCAGTTCCTGCAGCTGAGCACCAGCCTGCCTTCTCAGTACATTACTGGCCTG |
| | GCTGAGCATCTGAGCCCCCTGATGCTGAGCACCTCTTGGACCAGAATCACCCTGTGGAACAGGGACCTGGCTCCCACTCCTGGGGCCAACCTGTATGGCAGCCACCCCTTCTACCTGGCC |
| | CTGGAGGATGGGGGCTCTGCCCATGGGGTGTTCCTGCTGAACAGCAATGCCATGGATGTGGTGCTGCAGCCCTCTCCTGCCCTGTCTTGGAGATCTACTGGGGGCATCCTGGATGTGTAT |
| | ATCTTCCTGGGGCCTGAGCCCAAGTCTGTGGTGCAGCAGTACCTGGATGTGGTGGGCTACCCCTTCATGCCCCCCTACTGGGGCCTGGGCTTCCACCTGTGCAGGTGGGGCTACTCTTCT |
| | ACTGCTATCACCAGGCAGGTGGTGGAGAACATGACCAGGGCTCACTTCCCTCTGGATGTGCAGTGGAATGACCTGGACTACATGGACTCTAGGAGAGACTTCACTTTTAATAAGGATGGG |
| | TTCAGGGACTTTCCTGCCATGGTGCAGGAGCTGCATCAGGGGGGCAGGAGATATATGATGATTGTGGACCCTGCTATTTCTAGCTCTGGCCCTGCTGGCAGCTATAGGCCCTATGATGAG |
| | GGGCTGAGGAGGGGGGTGTTCATCACTAATGAGACTGGCCAGCCCCTGATTGGCAAGGTGTGGCCTGGCTCTACTGCCTTCCCTGATTTCACCAACCCCACTGCCCTGGCCTGGTGGGAG |
| | GATATGGTGGCTGAGTTTCATGACCAGGTGCCCTTTGATGGCATGTGGATTGACATGAATGAGCCCAGCAACTTTATCAGGGGCTCTGAAGATGGCTGCCCCAACAATGAGCTGGAGAAC |
| | CCCCCCTATGTGCCTGGGGTGGTGGGGGGCACCCTGCAGGCTGCCACCATCTGTGCCAGCAGCCACCAGTTCCTGAGCACCCACTATAACCTGCACAACCTGTATGGCCTGACTGAGGCC |
| | ATTGCCTCTCACAGGGCCCTGGTGAAGGCTAGGGGGACTAGGCCCTTTGTGATCAGCAGGTCTACTTTTGCTGGCCATGGCAGGTATGCTGGGCACTGGACTGGGGATGTGTGGTCTAGC |
| | TGGGAGCAGCTGGCCAGCTCTGTGCCTGAGATCCTGCAGTTTAATCTGCTGGGGGTGCCCCTGGTGGGGGCTGATGTGTGTGGCTTCCTGGGCAATACCTCTGAGGAGCTGTGTGTGAGG |
| | TGGACTCAGCTGGGGGCTTTCTACCCCTTCATGAGAAACCACAACTCTCTGCTGAGCCTGCCCCAGGAGCCCTATTCTTTTTCTGAGCCTGCCCAGCAGGCTATGAGGAAGGCCCTGACT |
| | CTGAGGTATGCCCTGCTGCCCCACCTGTATACCCTGTTCCATCAGGCCCATGTGGCTGGGGAGACTGTGGCCAGACCTCTGTTCCTGGAGTTCCCCAAGGATAGCTCTACTTGGACTGTG |
| | GACCACCAGCTGCTGTGGGGGGAGGCTCTGCTGATCACCCCTGTGCTGCAGGCTGGGAAGGCTGAGGTGACTGGCTATTTCCCCCTGGGCACCTGGTATGATCTGCAGACTGTGCCCATT |
| | GAGGCCCTGGGCTCTCTGCCCCCTCCCCCTGCTGCCCCCAGGGAGCCTGCCATCCACTCTGAGGGCCAGTGGGTGACCCTGCCTGCCCCTCTGGACACTATCAATGTGCACCTGAGGGCT |
| | GGCTACATCATCCCCCTGCAGGGCCCTGGCCTGACTACCACTGAGTCTAGGCAGCAGCCCATGGCCCTGGCTGTGGCTCTGACCAAGGGGGGGGAGGCCAGGGGGGAGCTGTTCTGGGAT |
| | GATGGGGAGTCTCTGGAGGTGCTGGAGAGGGGGGCCTACACCCAGGTGATCTTCCTGGCTAGGAATAACACCATTGTCAATGAGCTGGTGAGGGTGACCTCTGAGGGGGCTGGCCTGCAG |
| | CTGCAGAAGGTGACTGTGCTGGGGGTGGCTACTGCCCCCCAGCAGGTGCTGAGCAATGGGGTGCCTGTGAGCAACTTCACCTATAGCCCTGACACCAAGGTGCTGGACATCTGTGTGAGC |
| | CTGCTGATGGGGGAGCAGTTCCTGGTGAGCTGGTGCTAA |
| 23 | > ITR-to-ITR construct with coGAA nucleic acid |
| | >[L-ITR] - [ACTUS101-LSP] - [5′UTR] - [coGAA (w/sp)] - [3′UTR] - [PolIII_terminator] - [hGHpolyA] - [PolII_terminator-rev][R-ITR] |
| | CTGCGCGCTCGCTCGCTCACTGAGGCCGCCCGGGCAAAGCCCGGGCGTCGGGCGACCTTTGGTCGCCCGGCCTCAGTGAGCGAGCGAGCGCGCAGAGAGGGAGTGGCCAACTCCATCACTAGGGGTTCCTTGTAGTTAATGATTA |
| | ACCCGCCATGCTACTTATCTACGGCGCGCCACGCGTTCTAGGAGTTAATTTTTAAAAAGCAGTCAAAAGTCCAAGTGCCCTTGCGAGCATTTACTCTCTCTGTTTGCTCTGGTTAATAATCTCAGGAGCACAAACATTCCTTACT |
| | AGTTCTAGGAGTTAATTTTTAAAAAGCAGTCAAAAGTCCAAGTGCCCTTGCGAGCATTTACTCTCTCTGTTTGCTCTGGTTAATAATCTCAGGAGCACAAACATTCCTTACTAGTTCTAGAGCGGCCGCCAGTGTGCTGGAATTC |
| | GGCTTTTTTAGGGCTGGAAGCTACCTTTGACATCATTTCCTCTGCGAATGCATGTATAATTTCTACAGAACCTATTAGAAAGGATCACCCAGCCTCTGCTTTTGTACAACTTTCCCTTAAAAAACTGCCAATCCCACTGCTGTTT |
| | GGCCCAATAGTGAGAACTTTTTCCTGCTGCCTCTTGGTGCTTTTGCCTATGGCCCCTATTCTGCCTGCTGAAGACACTCTTGCCAGCATGGACTTAAACCCCTCCAGCTCTGACAATCCTCTTTCTCTTTTGTTTTACATGAAGG |
| | GTCTGGCAGCCAAAGCAATCACTCAAAGTTCAAACCTTATCATTTTTTGCTTTGTTCCTCTTGGCCTTGGTTTTGTACATCAGCTTTGAAAATACCATCCCAGGGTTAATGCTGGGGTTAATTTATAACTGAGAGTGCTCTAGTT |
| | CTGCAATACAGGACATGCTATAAAAATGGAAAGATGTTGCTTTCTGAGAGATCAGGTGGATTCTTGGGCATTTGCTTAAGCTTGGTACCGCCACCATGGGGGTGAGGCACCCTCCCTGTTCTCACAGGCTGCTGGCTGTGTGTGC |
| | TCTGGTGTCTCTGGCCACTGCTGCCCTGCTGGGCCATATCCTGCTGCATGACTTCCTGCTGGTGCCTAGGGAGCTGTCTGGCAGCAGCCCTGTGCTGGAAGAGACCCACCCTGCTCACCAGCAGGGGGCCAGCAGGCCAGGCCCC |
| | AGGGATGCCCAGGCCCACCCTGGCAGACCCAGGGCTGTGCCCACCCAGTGTGATGTGCCTCCCAACAGCAGATTTGACTGTGCCCCTGATAAGGCCATTACTCAGGAACAGTGTGAGGCCAGGGGCTGCTGCTATATCCCTGCCA |
| | AGCAGGGCCTGCAGGGGGCCCAGATGGGGCAGCCCTGGTGCTTCTTCCCCCCCAGCTACCCCTCTTATAAGCTGGAGAATCTGAGCAGCTCTGAAATGGGCTACACTGCCACTCTGACCAGGACTACCCCCACCTTCTTCCCCAA |
| | GGATATTCTGACTCTGAGGCTGGATGTGATGATGGAGACTGAGAACAGGCTGCACTTCACCATCAAGGACCCTGCCAACAGGAGGTATGAGGTGCCCCTGGAAACTCCCAGGGTGCACTCTAGGGCCCCCAGCCCCCTGTATTCT |
| | GTGGAGTTCTCTGAGGAGCCTTTTGGGGTCATTGTCCACAGGCAGCTGGATGGCAGGGTGCTGCTGAATACTACTGTGGCCCCTCTGTTCTTTGCTGACCAGTTCCTGCAGCTGAGCACCAGCCTGCCTTCTCAGTACATTACTG |
| | GCCTGGCTGAGCATCTGAGCCCCCTGATGCTGAGCACCTCTTGGACCAGAATCACCCTGTGGAACAGGGACCTGGCTCCCACTCCTGGGGCCAACCTGTATGGCAGCCACCCCTTCTACCTGGCCCTGGAGGATGGGGGCTCTGC |
| | CCATGGGGTGTTCCTGCTGAACAGCAATGCCATGGATGTGGTGCTGCAGCCCTCTCCTGCCCTGTCTTGGAGATCTACTGGGGGCATCCTGGATGTGTATATCTTCCTGGGGCCTGAGCCCAAGTCTGTGGTGCAGCAGTACCTG |
| | GATGTGGTGGGCTACCCCTTCATGCCCCCCTACTGGGGCCTGGGCTTCCACCTGTGCAGGTGGGGCTACTCTTCTACTGCTATCACCAGGCAGGTGGTGGAGAACATGACCAGGGCTCACTTCCCTCTGGATGTGCAGTGGAATG |
| | ACCTGGACTACATGGACTCTAGGAGAGACTTCACTTTTAATAAGGATGGGTTCAGGGACTTTCCTGCCATGGTGCAGGAGCTGCATCAGGGGGGCAGGAGATATATGATGATTGTGGACCCTGCTATTTCTAGCTCTGGCCCTGC |
| | TGGCAGCTATAGGCCCTATGATGAGGGGCTGAGGAGGGGGGTGTTCATCACTAATGAGACTGGCCAGCCCCTGATTGGCAAGGTGTGGCCTGGCTCTACTGCCTTCCCTGATTTCACCAACCCCACTGCCCTGGCCTGGTGGGAG |
| | GATATGGTGGCTGAGTTTCATGACCAGGTGCCCTTTGATGGCATGTGGATTGACATGAATGAGCCCAGCAACTTTATCAGGGGCTCTGAAGATGGCTGCCCCAACAATGAGCTGGAGAACCCCCCCTATGTGCCTGGGGTGGTGG |
| | GGGGCACCCTGCAGGCTGCCACCATCTGTGCCAGCAGCCACCAGTTCCTGAGCACCCACTATAACCTGCACAACCTGTATGGCCTGACTGAGGCCATTGCCTCTCACAGGGCCCTGGTGAAGGCTAGGGGGACTAGGCCCTTTGT |
| | GATCAGCAGGTCTACTTTTGCTGGCCATGGCAGGTATGCTGGGCACTGGACTGGGGATGTGTGGTCTAGCTGGGAGCAGCTGGCCAGCTCTGTGCCTGAGATCCTGCAGTTTAATCTGCTGGGGGTGCCCCTGGTGGGGGCTGAT |
| | GTGTGTGGCTTCCTGGGCAATACCTCTGAGGAGCTGTGTGTGAGGTGGACTCAGCTGGGGGCTTTCTACCCCTTCATGAGAAACCACAACTCTCTGCTGAGCCTGCCCCAGGAGCCCTATTCTTTTTCTGAGCCTGCCCAGCAGG |
| | CTATGAGGAAGGCCCTGACTCTGAGGTATGCCCTGCTGCCCCACCTGTATACCCTGTTCCATCAGGCCCATGTGGCTGGGGAGACTGTGGCCAGACCTCTGTTCCTGGAGTTCCCCAAGGATAGCTCTACTTGGACTGTGGACCA |
| | CCAGCTGCTGTGGGGGGAGGCTCTGCTGATCACCCCTGTGCTGCAGGCTGGGAAGGCTGAGGTGACTGGCTATTTCCCCCTGGGCACCTGGTATGATCTGCAGACTGTGCCCATTGAGGCCCTGGGCTCTCTGCCCCCTCCCCCT |
| | GCTGCCCCCAGGGAGCCTGCCATCCACTCTGAGGGCCAGTGGGTGACCCTGCCTGCCCCTCTGGACACTATCAATGTGCACCTGAGGGCTGGCTACATCATCCCCCTGCAGGGCCCTGGCCTGACTACCACTGAGTCTAGGCAGC |
| | AGCCCATGGCCCTGGCTGTGGCTCTGACCAAGGGGGGGGAGGCCAGGGGGGAGCTGTTCTGGGATGATGGGGAGTCTCTGGAGGTGCTGGAGAGGGGGGCCTACACCCAGGTGATCTTCCTGGCTAGGAATAACACCATTGTCAA |
| | TGAGCTGGTGAGGGTGACCTCTGAGGGGGCTGGCCTGCAGCTGCAGAAGGTGACTGTGCTGGGGGTGGCTACTGCCCCCCAGCAGGTGCTGAGCAATGGGGTGCCTGTGAGCAACTTCACCTATAGCCCTGACACCAAGGTGCTG |
| | GACATCTGTGTGAGCCTGCTGATGGGGGAGCAGTTCCTGGTGAGCTGGTGCTAATTTAAATCTCGAGCCGGGCGGAGTGTGTTAGTCTCTCCAGAGGGAGGCTGGTTCCCCAGGGAAGCAGAGCCTGTGTGCGGGCAGCAGCTGT |
| | GTGCGGGCCTGGGGGTTGTTAAGTGCAATTATTTTTAATAAAAGGGGCATTTGGAAAAAAAAAAAAAAGGTAGCAGTCGACAGATGAATTCTGCAGATCTGTGGCTTCTAGCTGCCCGGGTGGCATCCCTGTGACCCCTCCCCAG |
| | TGCCTCTCCTGGCCCTGGAAGTTGCCACTCCAGTGCCCACCAGCCTTGTCCTAATAAAATTAAGTTGCATCATTTTGTCTGACTAGGTGTCCTTCTATAATATTATGGGGTGGAGGGGGGTGGTATGGAGCAAGGGGCAAGTTGG |
| | GAAGACAACCTGTAGGGCCTGCGGGGTCTATTGGGAACCAAGCTGGAGTGCAGTGGCACAATCTTGGCTCACTGCAATCTCCGCCTCCTGGGTTCAAGCGATTCTCCTGCCTCAGCCTCCCGAGTTGTTGGGATTCCAGGCATGC |
| | ATGACCAGGCTCAGCTAATTTTTGTTTTTTTGGTAGAGACGGGGTTTCACCATATTGGCCAGGCTGGTCTCCAACTCCTAATCTCAGGTGATCTACCCACCTTGGCCTCCCAAATTGCTGGGATTACAGGCGTGAACCACTGCTC |
| | CCTTCCCTGTCCTTCTGATTTTAAAAAAAAGAGAAATGTTCTGGCACCTGCACTTGCACTGGGGACAGCCTATTTTGCTAGTTTGTTTTGTTTCGTTTTGTTTTGATGGAGAGCGTATGTTGTTTAAACGCGGCCGCGTAGATAA |
| | GTAGCATGGCGGGTTAATCATTAACTACAAGGAACCCCTAGTGATGGAGTTGGCCACTCCCTCTCTGCGCGCTCGCTCGCTCACTGAGGCCGGGCGACCAAAGGTCGCCCGACGCCCGGGCTTTGCCCGGGCGGCCTCAGTGAGC |
| | GAGCGAGCGCGCAG |
| 24 | > ITR-to-ITR construct with coGAA GAA nucleic acid |
| | >[L-ITR] - [ACTUS101-LSP] - [5′UTR] - [coGAA w/sp)] - [3′UTR] - [PolIII_terminator] - [hGHpolyA] - [PolII_terminator-rev][R-ITR] |
| | CTGCGCGCTCGCTCGCTCACTGAGGCCGCCCGGGCAAAGCCCGGGCGTCGGGCGACCTTTGGTCGCCCGGCCTCAGTGAGCGAGCGAGCGCGCAGAGAGGGAGTGGCCAACTCCATCACTAGGGGTTCCTTGTAGTTAATGATTA |
| | ACCCGCCATGCTACTTATCTACGGCGCGCCACGCGTTCTAGGAGTTAATTTTTAAAAAGCAGTCAAAAGTCCAAGTGCCCTTGCGAGCATTTACTCTCTCTGTTTGCTCTGGTTAATAATCTCAGGAGCACAAACATTCCTTACT |
| | AGTTCTAGGAGTTAATTTTTAAAAAGCAGTCAAAAGTCCAAGTGCCCTTGCGAGCATTTACTCTCTCTGTTTGCTCTGGTTAATAATCTCAGGAGCACAAACATTCCTTACTAGTTCTAGAGCGGCCGCCAGTGTGCTGGAATTC |
| | GGCTTTTTTAGGGCTGGAAGCTACCTTTGACATCATTTCCTCTGCGAATGCATGTATAATTTCTACAGAACCTATTAGAAAGGATCACCCAGCCTCTGCTTTTGTACAACTTTCCCTTAAAAAACTGCCAATCCCACTGCTGTTT |
| | GGCCCAATAGTGAGAACTTTTTCCTGCTGCCTCTTGGTGCTTTTGCCTATGGCCCCTATTCTGCCTGCTGAAGACACTCTTGCCAGCATGGACTTAAACCCCTCCAGCTCTGACAATCCTCTTTCTCTTTTGTTTTACATGAAGG |
| | GTCTGGCAGCCAAAGCAATCACTCAAAGTTCAAACCTTATCATTTTTTGCTTTGTTCCTCTTGGCCTTGGTTTTGTACATCAGCTTTGAAAATACCATCCCAGGGTTAATGCTGGGGTTAATTTATAACTGAGAGTGCTCTAGTT |
| | CTGCAATACAGGACATGCTATAAAAATGGAAAGATGTTGCTTTCTGAGAGATCAGGTGGATTCTTGGGCATTTGCTTAAGCTTGGTACCGCCACCATGGGAGTGAGACATCCTCCTTGTTCTCATAGACTGCTGGCTGTGTGTGC |
| | TCTGGTGTCTCTGGCTACAGCTGCTCTGCTGGGACATATTCTGCTGCATGATTTTCTGCTAGTGCCTAGAGAGCTGTCTGGATCTTCTCCTGTGCTGGAGGAGACACATCCTGCTCATCAGCAGGGAGCTTCTAGACCTGGACCT |
| | AGAGATGCTCAGGCTCATCCTGGAAGACCTAGAGCTGTGCCTACACAGTGTGATGTGCCTCCTAATTCTAGATTTGATTGTGCTCCTGATAAGGCTATAACACAGGAGCAGTGTGAGGCTAGAGGATGTTGTTATATTCCTGCTA |
| | AGCAGGGACTGCAGGGAGCTCAGATGGGACAGCCTTGGTGTTTTTTTCCTCCTTCTTATCCTTCTTATAAGCTGGAGAATCTGTCTTCTTCTGAGATGGGATATACAGCTACACTGACAAGAACAACACCTACATTTTTTCCTAA |
| | GGATATTCTGACACTGAGACTGGATGTGATGATGGAGACAGAGAATAGACTGCATTTTACAATTAAGGATCCTGCTAATAGAAGATATGAGGTGCCTCTAGAGACACCTAGAGTGCATTCTAGAGCTCCTTCTCCTCTGTATTCT |
| | GTGGAGTTTTCTGAGGAGCCTTTTGGAGTGATTGTGCATAGACAGCTGGATGGAAGAGTGCTGCTGAATACAACAGTGGCTCCTCTGTTTTTTGCTGATCAGTTTCTGCAGCTGTCTACATCTCTGCCTTCTCAGTATATTACAG |
| | GACTGGCTGAGCATCTGTCTCCTCTGATGCTGTCTACATCTTGGACAAGAATTACACTGTGGAATAGAGATCTGGCTCCTACACCTGGAGCTAATCTGTATGGATCTCATCCTTTTTATCTGGCTCTGGAGGATGGAGGATCTGC |
| | TCATGGAGTGTTTCTGCTGAATTCTAATGCTATGGATGTAGTGCTGCAGCCTTCTCCTGCTCTGTCTTGGAGATCTACAGGAGGAATTCTGGATGTGTATATTTTTCTAGGACCTGAGCCTAAGTCTGTGGTGCAGCAGTATCTG |
| | GATGTAGTGGGATATCCTTTTATGCCTCCTTATTGGGGACTGGGATTTCATCTGTGTAGATGGGGATATTCTTCTACAGCTATTACAAGACAGGTGGTTGAGAATATGACAAGAGCTCATTTTCCTCTGGATGTGCAGTGGAATG |
| | ATCTAGATTATATGGATTCTAGAAGAGATTTTACATTTAATAAGGATGGATTTAGAGATTTTCCTGCTATGGTGCAGGAGCTGCATCAGGGAGGAAGAAGATATATGATGATTGTGGATCCTGCTATTTCTTCTTCTGGACCTGC |
| | TGGATCTTATAGACCTTATGATGAGGGACTGAGAAGAGGAGTGTTTATTACAAATGAGACAGGACAGCCTCTGATTGGAAAGGTGTGGCCTGGATCTACAGCTTTTCCTGATTTTACAAATCCTACAGCTCTGGCTTGGTGGGAG |
| | GATATGGTGGCTGAGTTTCATGATCAGGTGCCTTTTGATGGAATGTGGATTGATATGAATGAGCCTTCTAATTTTATAAGAGGATCTGAGGATGGATGTCCTAATAATGAGCTAGAGAATCCTCCTTATGTGCCTGGAGTAGTGG |
| | GAGGAACACTGCAGGCTGCTACAATTTGTGCTTCTTCTCATCAGTTTCTGTCTACACATTATAATCTGCATAATCTGTATGGACTGACAGAGGCTATTGCTTCTCATAGAGCTCTGGTGAAGGCTAGAGGAACAAGACCTTTTGT |
| | GATTTCTAGATCTACATTTGCTGGACATGGAAGATATGCTGGACATTGGACAGGAGATGTATGGTCTTCTTGGGAGCAGCTAGCTTCTTCTGTGCCTGAGATTCTGCAGTTTAATCTGCTAGGAGTGCCTCTGGTGGGAGCTGAT |
| | GTGTGTGGATTTCTGGGAAATACATCTGAGGAGCTGTGTGTGAGATGGACACAGCTGGGAGCTTTTTATCCTTTTATGAGAAATCATAATTCTCTGCTGTCTCTGCCTCAGGAGCCTTATTCTTTTTCTGAGCCTGCTCAGCAGG |
| | CTATGAGAAAGGCTCTGACACTGAGATATGCTCTGCTGCCTCATCTGTATACACTGTTTCATCAGGCTCATGTGGCTGGAGAGACAGTAGCTAGACCTCTGTTTCTGGAGTTTCCTAAGGATTCTTCTACATGGACAGTTGATCA |
| | TCAGCTGCTGTGGGGAGAGGCTCTGCTGATTACACCTGTGCTGCAGGCTGGAAAGGCTGAGGTGACAGGATATTTTCCTCTGGGAACATGGTATGATCTGCAGACAGTGCCTATAGAGGCTCTGGGATCTCTGCCTCCTCCTCCT |
| | GCTGCTCCTAGAGAGCCTGCTATTCATTCTGAGGGACAGTGGGTGACACTGCCTGCTCCTCTGGATACAATTAATGTGCATCTGAGAGCTGGATATATTATTCCTCTGCAGGGACCTGGACTGACAACAACAGAGTCTAGACAGC |
| | AGCCTATGGCTCTGGCTGTGGCTCTGACAAAGGGAGGAGAGGCTAGAGGAGAGCTGTTTTGGGATGATGGAGAGTCTCTGGAGGTGCTGGAGAGAGGAGCTTATACACAGGTGATTTTTCTGGCTAGAAATAATACAATTGTGAA |
| | TGAGCTGGTGAGAGTGACATCTGAGGGAGCTGGACTGCAGCTGCAGAAGGTGACAGTGCTGGGAGTGGCTACAGCTCCTCAGCAGGTGCTGTCTAATGGAGTGCCTGTGTCTAATTTTACATATTCTCCTGATACAAAGGTGCTG |
| | GATATTTGTGTGTCTCTGCTGATGGGAGAGCAGTTTCTGGTGTCTTGGTGTTAATGATTTAAATCTCGAGCCGGGCGGAGTGTGTTAGTCTCTCCAGAGGGAGGCTGGTTCCCCAGGGAAGCAGAGCCTGTGTGCGGGCAGCAGC |
| | TGTGTGCGGGCCTGGGGGTTGTTAAGTGCAATTATTTTTAATAAAAGGGGCATTTGGAAAAAAAAAAAAAAGGTAGCAGTCGACAGATGAATTCTGCAGATCTGTGGCTTCTAGCTGCCCGGGTGGCATCCCTGTGACCCCTCCC |
| | CAGTGCCTCTCCTGGCCCTGGAAGTTGCCACTCCAGTGCCCACCAGCCTTGTCCTAATAAAATTAAGTTGCATCATTTTGTCTGACTAGGTGTCCTTCTATAATATTATGGGGTGGAGGGGGGTGGTATGGAGCAAGGGGCAAGT |
| | TGGGAAGACAACCTGTAGGGCCTGCGGGGTCTATTGGGAACCAAGCTGGAGTGCAGTGGCACAATCTTGGCTCACTGCAATCTCCGCCTCCTGGGTTCAAGCGATTCTCCTGCCTCAGCCTCCCGAGTTGTTGGGATTCCAGGCA |
| | TGCATGACCAGGCTCAGCTAATTTTTGTTTTTTTGGTAGAGACGGGGTTTCACCATATTGGCCAGGCTGGTCTCCAACTCCTAATCTCAGGTGATCTACCCACCTTGGCCTCCCAAATTGCTGGGATTACAGGCGTGAACCACTG |
| | CTCCCTTCCCTGTCCTTCTGATTTTAAAAAAAAGAGAAATGTTCTGGCACCTGCACTTGCACTGGGGACAGCCTATTTTGCTAGTTTGTTTTGTTTCGTTTTGTTTTGATGGAGAGCGTATGTTGTTTAAACGCGGCCGCGTAGA |
| | TAAGTAGCATGGCGGGTTAATCATTAACTACAAGGAACCCCTAGTGATGGAGTTGGCCACTCCCTCTCTGCGCGCTCGCTCGCTCACTGAGGCCGGGCGACCAAAGGTCGCCCGACGCCCGGGCTTTGCCCGGGCGGCCTCAGTG |
| | AGCGAGCGAGCGCGCAG |
| 25 | > coGAA GAA nucleic acid plus BGH polyA |
| | ATGGGGGTGAGGCACCCTCCCTGTTCTCACAGGCTGCTGGCTGTGTGTGCTCTGGTGTCTCTGGCCACTGCTGCCCTGCTGGGCCATATCCTGCTGCATGACTTCCTGCTGGTGCCTAGGGAGCTGTCTGGCAGCAGCCCTGTGC |
| | TGGAAGAGACCCACCCTGCTCACCAGCAGGGGGCCAGCAGGCCAGGCCCCAGGGATGCCCAGGCCCACCCTGGCAGACCCAGGGCTGTGCCCACCCAGTGTGATGTGCCTCCCAACAGCAGATTTGACTGTGCCCCTGATAAGGC |
| | CATTACTCAGGAACAGTGTGAGGCCAGGGGCTGCTGCTATATCCCTGCCAAGCAGGGCCTGCAGGGGGCCCAGATGGGGCAGCCCTGGTGCTTCTTCCCCCCCAGCTACCCCTCTTATAAGCTGGAGAATCTGAGCAGCTCTGAA |
| | ATGGGCTACACTGCCACTCTGACCAGGACTACCCCCACCTTCTTCCCCAAGGATATTCTGACTCTGAGGCTGGATGTGATGATGGAGACTGAGAACAGGCTGCACTTCACCATCAAGGACCCTGCCAACAGGAGGTATGAGGTGC |
| | CCCTGGAAACTCCCAGGGTGCACTCTAGGGCCCCCAGCCCCCTGTATTCTGTGGAGTTCTCTGAGGAGCCTTTTGGGGTCATTGTCCACAGGCAGCTGGATGGCAGGGTGCTGCTGAATACTACTGTGGCCCCTCTGTTCTTTGC |
| | TGACCAGTTCCTGCAGCTGAGCACCAGCCTGCCTTCTCAGTACATTACTGGCCTGGCTGAGCATCTGAGCCCCCTGATGCTGAGCACCTCTTGGACCAGAATCACCCTGTGGAACAGGGACCTGGCTCCCACTCCTGGGGCCAAC |
| | CTGTATGGCAGCCACCCCTTCTACCTGGCCCTGGAGGATGGGGGCTCTGCCCATGGGGTGTTCCTGCTGAACAGCAATGCCATGGATGTGGTGCTGCAGCCCTCTCCTGCCCTGTCTTGGAGATCTACTGGGGGCATCCTGGATG |
| | TGTATATCTTCCTGGGGCCTGAGCCCAAGTCTGTGGTGCAGCAGTACCTGGATGTGGTGGGCTACCCCTTCATGCCCCCCTACTGGGGCCTGGGCTTCCACCTGTGCAGGTGGGGCTACTCTTCTACTGCTATCACCAGGCAGGT |
| | GGTGGAGAACATGACCAGGGCTCACTTCCCTCTGGATGTGCAGTGGAATGACCTGGACTACATGGACTCTAGGAGAGACTTCACTTTTAATAAGGATGGGTTCAGGGACTTTCCTGCCATGGTGCAGGAGCTGCATCAGGGGGGC |
| | AGGAGATATATGATGATTGTGGACCCTGCTATTTCTAGCTCTGGCCCTGCTGGCAGCTATAGGCCCTATGATGAGGGGCTGAGGAGGGGGGTGTTCATCACTAATGAGACTGGCCAGCCCCTGATTGGCAAGGTGTGGCCTGGCT |
| | CTACTGCCTTCCCTGATTTCACCAACCCCACTGCCCTGGCCTGGTGGGAGGATATGGTGGCTGAGTTTCATGACCAGGTGCCCTTTGATGGCATGTGGATTGACATGAATGAGCCCAGCAACTTTATCAGGGGCTCTGAAGATGG |
| | CTGCCCCAACAATGAGCTGGAGAACCCCCCCTATGTGCCTGGGGTGGTGGGGGGCACCCTGCAGGCTGCCACCATCTGTGCCAGCAGCCACCAGTTCCTGAGCACCCACTATAACCTGCACAACCTGTATGGCCTGACTGAGGCC |
| | ATTGCCTCTCACAGGGCCCTGGTGAAGGCTAGGGGGACTAGGCCCTTTGTGATCAGCAGGTCTACTTTTGCTGGCCATGGCAGGTATGCTGGGCACTGGACTGGGGATGTGTGGTCTAGCTGGGAGCAGCTGGCCAGCTCTGTGC |
| | CTGAGATCCTGCAGTTTAATCTGCTGGGGGTGCCCCTGGTGGGGGCTGATGTGTGTGGCTTCCTGGGCAATACCTCTGAGGAGCTGTGTGTGAGGTGGACTCAGCTGGGGGCTTTCTACCCCTTCATGAGAAACCACAACTCTCT |
| | GCTGAGCCTGCCCCAGGAGCCCTATTCTTTTTCTGAGCCTGCCCAGCAGGCTATGAGGAAGGCCCTGACTCTGAGGTATGCCCTGCTGCCCCACCTGTATACCCTGTTCCATCAGGCCCATGTGGCTGGGGAGACTGTGGCCAGA |
| | CCTCTGTTCCTGGAGTTCCCCAAGGATAGCTCTACTTGGACTGTGGACCACCAGCTGCTGTGGGGGGAGGCTCTGCTGATCACCCCTGTGCTGCAGGCTGGGAAGGCTGAGGTGACTGGCTATTTCCCCCTGGGCACCTGGTATG |
| | ATCTGCAGACTGTGCCCATTGAGGCCCTGGGCTCTCTGCCCCCTCCCCCTGCTGCCCCCAGGGAGCCTGCCATCCACTCTGAGGGCCAGTGGGTGACCCTGCCTGCCCCTCTGGACACTATCAATGTGCACCTGAGGGCTGGCTA |
| | CATCATCCCCCTGCAGGGCCCTGGCCTGACTACCACTGAGTCTAGGCAGCAGCCCATGGCCCTGGCTGTGGCTCTGACCAAGGGGGGGGAGGCCAGGGGGGAGCTGTTCTGGGATGATGGGGAGTCTCTGGAGGTGCTGGAGAGG |
| | GGGGCCTACACCCAGGTGATCTTCCTGGCTAGGAATAACACCATTGTCAATGAGCTGGTGAGGGTGACCTCTGAGGGGGCTGGCCTGCAGCTGCAGAAGGTGACTGTGCTGGGGGTGGCTACTGCCCCCCAGCAGGTGCTGAGCA |
| | ATGGGGTGCCTGTGAGCAACTTCACCTATAGCCCTGACACCAAGGTGCTGGACATCTGTGTGAGCCTGCTGATGGGGGAGCAGTTCCTGGTGAGCTGGTGCTAATTTAAATCTCGAGCCGGGCGGAGTGTGTTAGTCTCTCCAGA |
| | GGGAGGCTGGTTCCCCAGGGAAGCAGAGCCTGTGTGCGGGCAGCAGCTGTGTGCGGGCCTGGGGGTTGTTAAGTGCAATTATTTTTAATAAAAGGGGCATTTGGAAAAAAAAAAAAAAGGTAGCAGTCGACAGATGAATTCTGCA |
| | GATCTGTGGCTTCTAGCTGCCCGGGTGGCATCCCTGTGACCCCTCCCCAGTGCCTCTCCTGGCCCTGGAAGTTGCCACTCCAGTGCCCACCAGCCTTGTCCTAATAAAATTAAGTTGCATCATTTTGTCTGACTAGGTGTCCTTC |
| | TATAATATTATGGGGTGGAGGGGGGTGGTATGGAGCAAGGGGCAAGTTGGGAAGACAACCTGTAGGGCCTGCGGGGTCTATTGGGAACCAAGCTGGAGTGCAGTGGCACAATCTTGGCTCACTGCAATCTCCGCCTCCTGGGTTC |
| | AAGCGATTCTCCTGCCTCAGCCTCCCGAGTTGTTGGGATTCCAGGCATGCATGACCAGGCTCAGCTAATTTTTGTTTTTTTGGTAGAGACGGGGTTTCACCATATTGGCCAGGCTGGTCTCCAACTCCTAATCTCAGGTGATCTA |
| | CCCACCTTGGCCTCCCAAATTGCTGGGATTACAGGCGTGAACCACTGCTCCCTTCCCTGTCCTTCTGATTTTAAAAAAA |
| 26 | > coGAA GAA nucleic acid plus BGH polyA and RevPolII |
| | ATGGGAGTGAGACATCCTCCTTGTTCTCATAGACTGCTGGCTGTGTGTGCTCTGGTGTCTCTGGCTACAGCTGCTCTGCTGGGACATATTCTGCTGCATGATTTTCTGCTAGTGCCTAGAGAGCTGTCTGGATCTTCTCCTGTGCT |
| | GGAGGAGACACATCCTGCTCATCAGCAGGGAGCTTCTAGACCTGGACCTAGAGATGCTCAGGCTCATCCTGGAAGACCTAGAGCTGTGCCTACACAGTGTGATGTGCCTCCTAATTCTAGATTTGATTGTGCTCCTGATAAGGCTA |
| | TAACACAGGAGCAGTGTGAGGCTAGAGGATGTTGTTATATTCCTGCTAAGCAGGGACTGCAGGGAGCTCAGATGGGACAGCCTTGGTGTTTTTTTCCTCCTTCTTATCCTTCTTATAAGCTGGAGAATCTGTCTTCTTCTGAGATG |
| | GGATATACAGCTACACTGACAAGAACAACACCTACATTTTTTCCTAAGGATATTCTGACACTGAGACTGGATGTGATGATGGAGACAGAGAATAGACTGCATTTTACAATTAAGGATCCTGCTAATAGAAGATATGAGGTGCCTCT |
| | AGAGACACCTAGAGTGCATTCTAGAGCTCCTTCTCCTCTGTATTCTGTGGAGTTTTCTGAGGAGCCTTTTGGAGTGATTGTGCATAGACAGCTGGATGGAAGAGTGCTGCTGAATACAACAGTGGCTCCTCTGTTTTTTGCTGATC |
| | AGTTTCTGCAGCTGTCTACATCTCTGCCTTCTCAGTATATTACAGGACTGGCTGAGCATCTGTCTCCTCTGATGCTGTCTACATCTTGGACAAGAATTACACTGTGGAATAGAGATCTGGCTCCTACACCTGGAGCTAATCTGTAT |
| | GGATCTCATCCTTTTTATCTGGCTCTGGAGGATGGAGGATCTGCTCATGGAGTGTTTCTGCTGAATTCTAATGCTATGGATGTAGTGCTGCAGCCTTCTCCTGCTCTGTCTTGGAGATCTACAGGAGGAATTCTGGATGTGTATAT |
| | TTTTCTAGGACCTGAGCCTAAGTCTGTGGTGCAGCAGTATCTGGATGTAGTGGGATATCCTTTTATGCCTCCTTATTGGGGACTGGGATTTCATCTGTGTAGATGGGGATATTCTTCTACAGCTATTACAAGACAGGTGGTTGAGA |
| | ATATGACAAGAGCTCATTTTCCTCTGGATGTGCAGTGGAATGATCTAGATTATATGGATTCTAGAAGAGATTTTACATTTAATAAGGATGGATTTAGAGATTTTCCTGCTATGGTGCAGGAGCTGCATCAGGGAGGAAGAAGATAT |
| | ATGATGATTGTGGATCCTGCTATTTCTTCTTCTGGACCTGCTGGATCTTATAGACCTTATGATGAGGGACTGAGAAGAGGAGTGTTTATTACAAATGAGACAGGACAGCCTCTGATTGGAAAGGTGTGGCCTGGATCTACAGCTTT |
| | TCCTGATTTTACAAATCCTACAGCTCTGGCTTGGTGGGAGGATATGGTGGCTGAGTTTCATGATCAGGTGCCTTTTGATGGAATGTGGATTGATATGAATGAGCCTTCTAATTTTATAAGAGGATCTGAGGATGGATGTCCTAATA |
| | ATGAGCTAGAGAATCCTCCTTATGTGCCTGGAGTAGTGGGAGGAACACTGCAGGCTGCTACAATTTGTGCTTCTTCTCATCAGTTTCTGTCTACACATTATAATCTGCATAATCTGTATGGACTGACAGAGGCTATTGCTTCTCAT |
| | AGAGCTCTGGTGAAGGCTAGAGGAACAAGACCTTTTGTGATTTCTAGATCTACATTTGCTGGACATGGAAGATATGCTGGACATTGGACAGGAGATGTATGGTCTTCTTGGGAGCAGCTAGCTTCTTCTGTGCCTGAGATTCTGCA |
| | GTTTAATCTGCTAGGAGTGCCTCTGGTGGGAGCTGATGTGTGTGGATTTCTGGGAAATACATCTGAGGAGCTGTGTGTGAGATGGACACAGCTGGGAGCTTTTTATCCTTTTATGAGAAATCATAATTCTCTGCTGTCTCTGCCTC |
| | AGGAGCCTTATTCTTTTTCTGAGCCTGCTCAGCAGGCTATGAGAAAGGCTCTGACACTGAGATATGCTCTGCTGCCTCATCTGTATACACTGTTTCATCAGGCTCATGTGGCTGGAGAGACAGTAGCTAGACCTCTGTTTCTGGAG |
| | TTTCCTAAGGATTCTTCTACATGGACAGTTGATCATCAGCTGCTGTGGGGAGAGGCTCTGCTGATTACACCTGTGCTGCAGGCTGGAAAGGCTGAGGTGACAGGATATTTTCCTCTGGGAACATGGTATGATCTGCAGACAGTGCC |
| | TATAGAGGCTCTGGGATCTCTGCCTCCTCCTCCTGCTGCTCCTAGAGAGCCTGCTATTCATTCTGAGGGACAGTGGGTGACACTGCCTGCTCCTCTGGATACAATTAATGTGCATCTGAGAGCTGGATATATTATTCCTCTGCAGG |
| | GACCTGGACTGACAACAACAGAGTCTAGACAGCAGCCTATGGCTCTGGCTGTGGCTCTGACAAAGGGAGGAGAGGCTAGAGGAGAGCTGTTTTGGGATGATGGAGAGTCTCTGGAGGTGCTGGAGAGAGGAGCTTATACACAGGTG |
| | ATTTTTCTGGCTAGAAATAATACAATTGTGAATGAGCTGGTGAGAGTGACATCTGAGGGAGCTGGACTGCAGCTGCAGAAGGTGACAGTGCTGGGAGTGGCTACAGCTCCTCAGCAGGTGCTGTCTAATGGAGTGCCTGTGTCTAA |
| | TTTTACATATTCTCCTGATACAAAGGTGCTGGATATTTGTGTGTCTCTGCTGATGGGAGAGCAGTTTCTGGTGTCTTGGTGTTAATGATTTAAATCTCGAGCCGGGCGGAGTGTGTTAGTCTCTCCAGAGGGAGGCTGGTTCCCCA |
| | GGGAAGCAGAGCCTGTGTGCGGGCAGCAGCTGTGTGCGGGCCTGGGGGTTGTTAAGTGCAATTATTTTTAATAAAAGGGGCATTTGGAAAAAAAAAAAAAAGGTAGCAGTCGACAGATGAATTCTGCAGATCTGTGGCTTCTAGCT |
| | GCCCGGGTGGCATCCCTGTGACCCCTCCCCAGTGCCTCTCCTGGCCCTGGAAGTTGCCACTCCAGTGCCCACCAGCCTTGTCCTAATAAAATTAAGTTGCATCATTTTGTCTGACTAGGTGTCCTTCTATAATATTATGGGGTGGA |
| | GGGGGGTGGTATGGAGCAAGGGGCAAGTTGGGAAGACAACCTGTAGGGCCTGCGGGGTCTATTGGGAACCAAGCTGGAGTGCAGTGGCACAATCTTGGCTCACTGCAATCTCCGCCTCCTGGGTTCAAGCGATTCTCCTGCCTCAG |
| | CCTCCCGAGTTGTTGGGATTCCAGGCATGCATGACCAGGCTCAGCTAATTTTTGTTTTTTTGGTAGAGACGGGGTTTCACCATATTGGCCAGGCTGGTCTCCAACTCCTAATCTCAGGTGATCTACCCACCTTGGCCTCCCAAATT |
| | GCTGGGATTACAGGCGTGAACCACTGCTCCCTTCCCTGTCCTTCTGATTTTAAAAAAAAGAGAAATGTTCTGGCACCTGCACTTGCACTGGGGACAGCCTATTTTGCTAGTTTGTTTTGTTTCGTTTTGTTTTGATGGAGAGCGTA |
| | TGTT |
| 27 | > coGAA plasmid construct |
| | TCTAGAGCTAGCATATGGATCCATCGATTTAGGGATAACAGGGTAATTATCAGCACACAATTGCCCATTATACGCGCGTATAATGGACTATTGTGTGCTGATATCTGTACACTTAAGGGCTAGATCTTAGCTTACGTCACTAGAG |
| | GGTCCACGTTTAGTTTTTAAGATCCATTGATCTCCTAAACGCTGCAAGATTCGCAACCTGGTATACTTAGCCTAGGCGCTAGGTCCTAGTGCAGCGGGACTTTTTTTCTAAAGTCGTTGAGAGGAGGAGTCGTCAGACCAGATAG |
| | CTTTGATGTCCTGATCGGAAGGATCGTTGGCCCCCCTGCAGGCAGCTGTTAATTAACTGCGCGCTCGCTCGCTCACTGAGGCCGCCCGGGCAAAGCCCGGGCGTCGGGCGACCTTTGGTCGCCCGGCCTCAGTGAGCGAGCGAGC |
| | GCGCAGAGAGGGAGTGGCCAACTCCATCACTAGGGGTTCCTTGTAGTTAATGATTAACCCGCCATGCTACTTATCTACGGCGCGCCACGCGTTCTAGGAGTTAATTTTTAAAAAGCAGTCAAAAGTCCAAGTGCCCTTGCGAGCA |
| | TTTACTCTCTCTGTTTGCTCTGGTTAATAATCTCAGGAGCACAAACATTCCTTACTAGTTCTAGGAGTTAATTTTTAAAAAGCAGTCAAAAGTCCAAGTGCCCTTGCGAGCATTTACTCTCTCTGTTTGCTCTGGTTAATAATCT |
| | CAGGAGCACAAACATTCCTTACTAGTTCTAGAGCGGCCGCCAGTGTGCTGGAATTCGGCTTTTTTAGGGCTGGAAGCTACCTTTGACATCATTTCCTCTGCGAATGCATGTATAATTTCTACAGAACCTATTAGAAAGGATCACC |
| | CAGCCTCTGCTTTTGTACAACTTTCCCTTAAAAAACTGCCAATCCCACTGCTGTTTGGCCCAATAGTGAGAACTTTTTCCTGCTGCCTCTTGGTGCTTTTGCCTATGGCCCCTATTCTGCCTGCTGAAGACACTCTTGCCAGCAT |
| | GGACTTAAACCCCTCCAGCTCTGACAATCCTCTTTCTCTTTTGTTTTACATGAAGGGTCTGGCAGCCAAAGCAATCACTCAAAGTTCAAACCTTATCATTTTTTGCTTTGTTCCTCTTGGCCTTGGTTTTGTACATCAGCTTTGA |
| | AAATACCATCCCAGGGTTAATGCTGGGGTTAATTTATAACTGAGAGTGCTCTAGTTCTGCAATACAGGACATGCTATAAAAATGGAAAGATGTTGCTTTCTGAGAGATCAGGTGGATTCTTGGGCATTTGCTTAAGCTTGGTACC |
| | GCCACCATGGGGGTGAGGCACCCTCCCTGTTCTCACAGGCTGCTGGCTGTGTGTGCTCTGGTGTCTCTGGCCACTGCTGCCCTGCTGGGCCATATCCTGCTGCATGACTTCCTGCTGGTGCCTAGGGAGCTGTCTGGCAGCAGCC |
| | CTGTGCTGGAAGAGACCCACCCTGCTCACCAGCAGGGGGCCAGCAGGCCAGGCCCCAGGGATGCCCAGGCCCACCCTGGCAGACCCAGGGCTGTGCCCACCCAGTGTGATGTGCCTCCCAACAGCAGATTTGACTGTGCCCCTGA |
| | TAAGGCCATTACTCAGGAACAGTGTGAGGCCAGGGGCTGCTGCTATATCCCTGCCAAGCAGGGCCTGCAGGGGGCCCAGATGGGGCAGCCCTGGTGCTTCTTCCCCCCCAGCTACCCCTCTTATAAGCTGGAGAATCTGAGCAGC |
| | TCTGAAATGGGCTACACTGCCACTCTGACCAGGACTACCCCCACCTTCTTCCCCAAGGATATTCTGACTCTGAGGCTGGATGTGATGATGGAGACTGAGAACAGGCTGCACTTCACCATCAAGGACCCTGCCAACAGGAGGTATG |
| | AGGTGCCCCTGGAAACTCCCAGGGTGCACTCTAGGGCCCCCAGCCCCCTGTATTCTGTGGAGTTCTCTGAGGAGCCTTTTGGGGTCATTGTCCACAGGCAGCTGGATGGCAGGGTGCTGCTGAATACTACTGTGGCCCCTCTGTT |
| | CTTTGCTGACCAGTTCCTGCAGCTGAGCACCAGCCTGCCTTCTCAGTACATTACTGGCCTGGCTGAGCATCTGAGCCCCCTGATGCTGAGCACCTCTTGGACCAGAATCACCCTGTGGAACAGGGACCTGGCTCCCACTCCTGGG |
| | GCCAACCTGTATGGCAGCCACCCCTTCTACCTGGCCCTGGAGGATGGGGGCTCTGCCCATGGGGTGTTCCTGCTGAACAGCAATGCCATGGATGTGGTGCTGCAGCCCTCTCCTGCCCTGTCTTGGAGATCTACTGGGGGCATCC |
| | TGGATGTGTATATCTTCCTGGGGCCTGAGCCCAAGTCTGTGGTGCAGCAGTACCTGGATGTGGTGGGCTACCCCTTCATGCCCCCCTACTGGGGCCTGGGCTTCCACCTGTGCAGGTGGGGCTACTCTTCTACTGCTATCACCAG |
| | GCAGGTGGTGGAGAACATGACCAGGGCTCACTTCCCTCTGGATGTGCAGTGGAATGACCTGGACTACATGGACTCTAGGAGAGACTTCACTTTTAATAAGGATGGGTTCAGGGACTTTCCTGCCATGGTGCAGGAGCTGCATCAG |
| | GGGGGCAGGAGATATATGATGATTGTGGACCCTGCTATTTCTAGCTCTGGCCCTGCTGGCAGCTATAGGCCCTATGATGAGGGGCTGAGGAGGGGGGTGTTCATCACTAATGAGACTGGCCAGCCCCTGATTGGCAAGGTGTGGC |
| | CTGGCTCTACTGCCTTCCCTGATTTCACCAACCCCACTGCCCTGGCCTGGTGGGAGGATATGGTGGCTGAGTTTCATGACCAGGTGCCCTTTGATGGCATGTGGATTGACATGAATGAGCCCAGCAACTTTATCAGGGGCTCTGA |
| | AGATGGCTGCCCCAACAATGAGCTGGAGAACCCCCCCTATGTGCCTGGGGTGGTGGGGGGCACCCTGCAGGCTGCCACCATCTGTGCCAGCAGCCACCAGTTCCTGAGCACCCACTATAACCTGCACAACCTGTATGGCCTGACT |
| | GAGGCCATTGCCTCTCACAGGGCCCTGGTGAAGGCTAGGGGGACTAGGCCCTTTGTGATCAGCAGGTCTACTTTTGCTGGCCATGGCAGGTATGCTGGGCACTGGACTGGGGATGTGTGGTCTAGCTGGGAGCAGCTGGCCAGCT |
| | CTGTGCCTGAGATCCTGCAGTTTAATCTGCTGGGGGTGCCCCTGGTGGGGGCTGATGTGTGTGGCTTCCTGGGCAATACCTCTGAGGAGCTGTGTGTGAGGTGGACTCAGCTGGGGGCTTTCTACCCCTTCATGAGAAACCACAA |
| | CTCTCTGCTGAGCCTGCCCCAGGAGCCCTATTCTTTTTCTGAGCCTGCCCAGCAGGCTATGAGGAAGGCCCTGACTCTGAGGTATGCCCTGCTGCCCCACCTGTATACCCTGTTCCATCAGGCCCATGTGGCTGGGGAGACTGTG |
| | GCCAGACCTCTGTTCCTGGAGTTCCCCAAGGATAGCTCTACTTGGACTGTGGACCACCAGCTGCTGTGGGGGGAGGCTCTGCTGATCACCCCTGTGCTGCAGGCTGGGAAGGCTGAGGTGACTGGCTATTTCCCCCTGGGCACCT |
| | GGTATGATCTGCAGACTGTGCCCATTGAGGCCCTGGGCTCTCTGCCCCCTCCCCCTGCTGCCCCCAGGGAGCCTGCCATCCACTCTGAGGGCCAGTGGGTGACCCTGCCTGCCCCTCTGGACACTATCAATGTGCACCTGAGGGC |
| | TGGCTACATCATCCCCCTGCAGGGCCCTGGCCTGACTACCACTGAGTCTAGGCAGCAGCCCATGGCCCTGGCTGTGGCTCTGACCAAGGGGGGGGAGGCCAGGGGGGAGCTGTTCTGGGATGATGGGGAGTCTCTGGAGGTGCTG |
| | GAGAGGGGGGCCTACACCCAGGTGATCTTCCTGGCTAGGAATAACACCATTGTCAATGAGCTGGTGAGGGTGACCTCTGAGGGGGCTGGCCTGCAGCTGCAGAAGGTGACTGTGCTGGGGGTGGCTACTGCCCCCCAGCAGGTGC |
| | TGAGCAATGGGGTGCCTGTGAGCAACTTCACCTATAGCCCTGACACCAAGGTGCTGGACATCTGTGTGAGCCTGCTGATGGGGGAGCAGTTCCTGGTGAGCTGGTGCTAATTTAAATCTCGAGCCGGGCGGAGTGTGTTAGTCTC |
| | TCCAGAGGGAGGCTGGTTCCCCAGGGAAGCAGAGCCCTGTGTGCGGGCAGCAGCTGTGTGCGGGCCTGGGGGTTGTTAAGTGCAATTATTTTTAATAAAAGGGGCATTTGGAAAAAAAAAAAAAGGTAGCAGTCGACAGATGAAT |
| | TCTGCAGATCTGTGGCTTCTAGCTGCCCGGGTGGCATCCCTGTGACCCCTCCCCAGTGCCTCTCCTGGCCCTGGAAGTTGCCACTCCAGTGCCCACCAGCCTTGTCCTAATAAAATTAAGTTGCATCATTTTGTCTGACTAGGTG |
| | TCCTTCTATAATATTATGGGGTGGAGGGGGGTGGTATGGAGCAAGGGGCAAGTTGGGAAGACAACCTGTAGGGCCTGCGGGGTCTATTGGGAACCAAGCTGGAGTGCAGTGGCACAATCTTGGCTCACTGCAATCTCCGCCTCCT |
| | GGGTTCAAGCGATTCTCCTGCCTCAGCCTCCCGAGTTGTTGGGATTCCAGGCATGCATGACCAGGCTCAGCTAATTTTTGTTTTTTTGGTAGAGACGGGGTTTCACCATATTGGCCAGGCTGGTCTCCAACTCCTAATCTCAGGT |
| | GATCTACCCACCTTGGCCTCCCAAATTGCTGGGATTACAGGCGTGAACCACTGCTCCCTTCCCTGTCCTTCTGATTTTAAAAAAAAGAGAAATGTTCTGGCACCTGCACTTGCACTGGGGACAGCCTATTTTGCTAGTTTGTTTT |
| | GTTTCGTTTTGTTTTGATGGAGAGCGTATGTTGTTTAAACGCGGCCGCGTAGATAAGTAGCATGGCGGGTTAATCATTAACTACAAGGAACCCCTAGTGATGGAGTTGGCCACTCCCTCTCTGCGCGCTCGCTCGCTCACTGAGG |
| | CCGGGCGACCAAAGGTCGCCCGACGCCCGGGCTTTGCCCGGGCGGCCTCAGTGAGCGAGCGAGCGCGCAGTTAATTAAGGCGCCCTAGGCCGACCCTTAGACTCTGTACTCAGTTCTATAAACGAGCCATTGGATACGAGATCCG |
| | TAGATTGATAAGGGACACGGAATATCCCCGGACGCAATAGACACCGGTGGACAGCTTGGTATCCTGAGCACAGTCGCGCGTCCGAATCTAGCTCTACTTTAGAGGCCCCGGATTCTGATGGTCGTAGACCGCAGAACCGATTGGG |
| | GGGATGAGATCTACTAGTTATCAGCACACAATTGCCCATTATACGCGCGTATAATGGACTATTGTGTGCTGATATAGGGATAACAGGGTAATTCTAGAGCTAGCATATGGATCCATCGATTTGATGCGGTATTTTCTCCTTACGC |
| | ATCTGTGCGGTATTTCACACCGCATACGTCAAAGCAACCATAGTACGCGCCCTGTAGCGGCGCATTAAGCGCGGCGGGTGTGGTGGTTACGCGCAGCGTGACCGCTACACTTGCCAGCGCCCTAGCGCCCGCTCCTTTCGCTTTC |
| | TTCCCTTCCTTTCTCGCCACGTTCGCCGGCTTTCCCCGTCAAGCTCTAAATCGGGGGCTCCCTTTAGGGTTCCGATTTAGTGCTTTACGGCACCTCGACCCCAAAAAACTTGATTTGGGTGATGGTTCACGTAGTGGGCCATCGC |
| | CCTGATAGACGGTTTTTCGCCCTTTGACGTTGGAGTCCACGTTCTTTAATAGTGGACTCTTGTTCCAAACTGGAACAACACTCAACTCTATCTCGGGCTATTCTTTTGATTTATAAGGGATTTTGCCGATTTCGGTCTATTGGTT |
| | AAAAAATGAGCTGATTTAACAAAAATTTAACGCGAATTTTAACAAAATATTAACGTTTACAATTTTATGGTGCACTCTCAGTACAATCTGCTCTGATGCCGCATAGTTAAGCCAGCCCCGACACCCGCCAACACCCGCTGACGCG |
| | CCCTGACGGGCTTGTCTGCTCCCGGCATCCGCTTACAGACAAGCTGTGACCGTCTCCGGGAGCTGCATGTGTCAGAGGTTTTCACCGTCATCACCGAAACGCGCGAGACGAAAGGGCCTCGTGATACGCCTATTTTTATAGGTTA |
| | ATGTCATGATAATAATGGTTTCTTAGACGTCAGGTGGCACTTTTCGGGGAAATGTGCGCGGAACCCCTATTTGTTTATTTTTCTAAATACATTCAAATATGTATCCGCTCATGAGACAATAACCCTGATAAATGCTTCAATAATA |
| | TTGAAAAAGGAAGAGTATGAGCCATATTCAACGGGAAACGTCGAGGCCGCGATTAAATTCCAACATGGATGCTGATTTATATGGGTATAAATGGGCTCGCGATAATGTCGGGCAATCAGGTGCGACAATCTATCGCTTGTATGGG |
| | AAGCCCGATGCGCCAGAGTTGTTTCTGAAACATGGCAAAGGTAGCGTTGCCAATGATGTTACAGATGAGATGGTCAGACTAAACTGGCTGACGGAATTTATGCCTCTTCCGACCATCAAGCATTTTATCCGTACTCCTGATGATG |
| | CATGGTTACTCACCACTGCGATCCCCGGAAAAACAGCATTCCAGGTATTAGAAGAATATCCTGATTCAGGTGAAAATATTGTTGATGCGCTGGCAGTGTTCCTGCGCCGGTTGCATTCGATTCCTGTTTGTAATTGTCCTTTTAA |
| | CAGCGATCGCGTATTTCGTCTCGCTCAGGCGCAATCACGAATGAATAACGGTTTGGTTGATGCGAGTGATTTTGATGACGAGCGTAATGGCTGGCCTGTTGAACAAGTCTGGAAAGAAATGCATAAACTTTTGCCATTCTCACCG |
| | GATTCAGTCGTCACTCATGGTGATTTCTCACTTGATAACCTTATTTTTGACGAGGGGAAATTAATAGGTTGTATTGATGTTGGACGAGTCGGAATCGCAGACCGATACCAGGATCTTGCCATCCTATGGAACTGCCTCGGTGAGT |
| | TTTCTCCTTCATTACAGAAACGGCTTTTTCAAAAATATGGTATTGATAATCCTGATATGAATAAATTGCAGTTTCATTTGATGCTCGATGAGTTTTTCTAAGCGTATAATGGTCTAGAGCTAGCATATGGATCCATCGATTCCAT |
| | TATACGCCTGTCAGACCAAGTTTACTCATATATACTTTAGATTGATTTAAAACTTCATTTTTAATTTAAAAGGATCTAGGTGAAGATCCTTTTTGATAATCTCATGACCAAAATCCCTTAACGTGAGTTTTCGTTCCACTGAGCG |
| | TCAGACCCCGTAGAAAAGATCAAAGGATCTTCTTGAGATCCTTTTTTTCTGCGCGTAATCTGCTGCTTGCAAACAAAAAAACCACCGCTACCAGCGGTGGTTTGTTTGCCGGATCAAGAGCTACCAACTCTTTTTCCGAAGGTAA |
| | CTGGCTTCAGCAGAGCGCAGATACCAAATACTGTTCTTCTAGTGTAGCCGTAGTTAGGCCACCACTTCAAGAACTCTGTAGCACCGCCTACATACCTCGCTCTGCTAATCCTGTTACCAGTGGCTGCTGCCAGTGGCGATAAGTC |
| | GTGTCTTACCGGGTTGGACTCAAGACGATAGTTACCGGATAAGGCGCAGCGGTCGGGCTGAACGGGGGGTTCGTGCACACAGCCCAGCTTGGAGCGAACGACCTACACCGAACTGAGATACCTACAGCGTGAGCTATGAGAAAGC |
| | GCCACGCTTCCCGAAGGGAGAAAGGCGGACAGGTATCCGGTAAGCGGCAGGGTCGGAACAGGAGAGCGCACGAGGGAGCTTCCAGGGGGAAACGCCTGGTATCTTTATAGTCCTGTCGGGTTTCGCCACCTCTGACTTGAGCGTC |
| | GATTTTTGTGATGCTCGTCAGGGGGGCGGAGCCTATGGAAAAACGCCAGCAACGCGGCCTTTTTACGGTTCCTGGCCTTTTGCTGGCCTTTTGCTCACATGT |
| 28 | > coGAAAA plasmid construct |
| | TCTAGAGCTAGCATATGGATCCATCGATTTAGGGATAACAGGGTAATTATCAGCACACAATTGCCCATTATACGCGCGTATAATGGACTATTGTGTGCTGATATCTGTACACTTAAGGGCTAGATCTTAGCTTACGTCACTAGAG |
| | GGTCCACGTTTAGTTTTTAAGATCCATTGATCTCCTAAACGCTGCAAGATTCGCAACCTGGTATACTTAGCCTAGGCGCTAGGTCCTAGTGCAGCGGGACTTTTTTTCTAAAGTCGTTGAGAGGAGGAGTCGTCAGACCAGATAG |
| | CTTTGATGTCCTGATCGGAAGGATCGTTGGCCCCCCTGCAGGCAGCTGTTAATTAACTGCGCGCTCGCTCGCTCACTGAGGCCGCCCGGGCAAAGCCCGGGCGTCGGGCGACCTTTGGTCGCCCGGCCTCAGTGAGCGAGCGAGC |
| | GCGCAGAGAGGGAGTGGCCAACTCCATCACTAGGGGTTCCTTGTAGTTAATGATTAACCCGCCATGCTACTTATCTACGGCGCGCCACGCGTTCTAGGAGTTAATTTTTAAAAAGCAGTCAAAAGTCCAAGTGCCCTTGCGAGCA |
| | TTTACTCTCTCTGTTTGCTCTGGTTAATAATCTCAGGAGCACAAACATTCCTTACTAGTTCTAGGAGTTAATTTTTAAAAAGCAGTCAAAAGTCCAAGTGCCCTTGCGAGCATTTACTCTCTCTGTTTGCTCTGGTTAATAATCT |
| | CAGGAGCACAAACATTCCTTACTAGTTCTAGAGCGGCCGCCAGTGTGCTGGAATTCGGCTTTTTTAGGGCTGGAAGCTACCTTTGACATCATTTCCTCTGCGAATGCATGTATAATTTCTACAGAACCTATTAGAAAGGATCACC |
| | CAGCCTCTGCTTTTGTACAACTTTCCCTTAAAAAACTGCCAATCCCACTGCTGTTTGGCCCAATAGTGAGAACTTTTTCCTGCTGCCTCTTGGTGCTTTTGCCTATGGCCCCTATTCTGCCTGCTGAAGACACTCTTGCCAGCAT |
| | GGACTTAAACCCCTCCAGCTCTGACAATCCTCTTTCTCTTTTGTTTTACATGAAGGGTCTGGCAGCCAAAGCAATCACTCAAAGTTCAAACCTTATCATTTTTTGCTTTGTTCCTCTTGGCCTTGGTTTTGTACATCAGCTTTGA |
| | AAATACCATCCCAGGGTTAATGCTGGGGTTAATTTATAACTGAGAGTGCTCTAGTTCTGCAATACAGGACATGCTATAAAAATGGAAAGATGTTGCTTTCTGAGAGATCAGGTGGATTCTTGGGCATTTGCTTAAGCTTGGTACC |
| | GCCACCATGGGAGTGAGACATCCTCCTTGTTCTCATAGACTGCTGGCTGTGTGTGCTCTGGTGTCTCTGGCTACAGCTGCTCTGCTGGGACATATTCTGCTGCATGATTTTCTGCTAGTGCCTAGAGAGCTGTCTGGATCTTCTC |
| | CTGTGCTGGAGGAGACACATCCTGCTCATCAGCAGGGAGCTTCTAGACCTGGACCTAGAGATGCTCAGGCTCATCCTGGAAGACCTAGAGCTGTGCCTACACAGTGTGATGTGCCTCCTAATTCTAGATTTGATTGTGCTCCTGA |
| | TAAGGCTATAACACAGGAGCAGTGTGAGGCTAGAGGATGTTGTTATATTCCTGCTAAGCAGGGACTGCAGGGAGCTCAGATGGGACAGCCTTGGTGTTTTTTTCCTCCTTCTTATCCTTCTTATAAGCTGGAGAATCTGTCTTCT |
| | TCTGAGATGGGATATACAGCTACACTGACAAGAACAACACCTACATTTTTTCCTAAGGATATTCTGACACTGAGACTGGATGTGATGATGGAGACAGAGAATAGACTGCATTTTACAATTAAGGATCCTGCTAATAGAAGATATG |
| | AGGTGCCTCTAGAGACACCTAGAGTGCATTCTAGAGCTCCTTCTCCTCTGTATTCTGTGGAGTTTTCTGAGGAGCCTTTTGGAGTGATTGTGCATAGACAGCTGGATGGAAGAGTGCTGCTGAATACAACAGTGGCTCCTCTGTT |
| | TTTTGCTGATCAGTTTCTGCAGCTGTCTACATCTCTGCCTTCTCAGTATATTACAGGACTGGCTGAGCATCTGTCTCCTCTGATGCTGTCTACATCTTGGACAAGAATTACACTGTGGAATAGAGATCTGGCTCCTACACCTGGA |
| | GCTAATCTGTATGGATCTCATCCTTTTTATCTGGCTCTGGAGGATGGAGGATCTGCTCATGGAGTGTTTCTGCTGAATTCTAATGCTATGGATGTAGTGCTGCAGCCTTCTCCTGCTCTGTCTTGGAGATCTACAGGAGGAATTC |
| | TGGATGTGTATATTTTTCTAGGACCTGAGCCTAAGTCTGTGGTGCAGCAGTATCTGGATGTAGTGGGATATCCTTTTATGCCTCCTTATTGGGGACTGGGATTTCATCTGTGTAGATGGGGATATTCTTCTACAGCTATTACAAG |
| | ACAGGTGGTTGAGAATATGACAAGAGCTCATTTTCCTCTGGATGTGCAGTGGAATGATCTAGATTATATGGATTCTAGAAGAGATTTTACATTTAATAAGGATGGATTTAGAGATTTTCCTGCTATGGTGCAGGAGCTGCATCAG |
| | GGAGGAAGAAGATATATGATGATTGTGGATCCTGCTATTTCTTCTTCTGGACCTGCTGGATCTTATAGACCTTATGATGAGGGACTGAGAAGAGGAGTGTTTATTACAAATGAGACAGGACAGCCTCTGATTGGAAAGGTGTGGC |
| | CTGGATCTACAGCTTTTCCTGATTTTACAAATCCTACAGCTCTGGCTTGGTGGGAGGATATGGTGGCTGAGTTTCATGATCAGGTGCCTTTTGATGGAATGTGGATTGATATGAATGAGCCTTCTAATTTTATAAGAGGATCTGA |
| | GGATGGATGTCCTAATAATGAGCTAGAGAATCCTCCTTATGTGCCTGGAGTAGTGGGAGGAACACTGCAGGCTGCTACAATTTGTGCTTCTTCTCATCAGTTTCTGTCTACACATTATAATCTGCATAATCTGTATGGACTGACA |
| | GAGGCTATTGCTTCTCATAGAGCTCTGGTGAAGGCTAGAGGAACAAGACCTTTTGTGATTTCTAGATCTACATTTGCTGGACATGGAAGATATGCTGGACATTGGACAGGAGATGTATGGTCTTCTTGGGAGCAGCTAGCTTCTT |
| | CTGTGCCTGAGATTCTGCAGTTTAATCTGCTAGGAGTGCCTCTGGTGGGAGCTGATGTGTGTGGATTTCTGGGAAATACATCTGAGGAGCTGTGTGTGAGATGGACACAGCTGGGAGCTTTTTATCCTTTTATGAGAAATCATAA |
| | TTCTCTGCTGTCTCTGCCTCAGGAGCCTTATTCTTTTTCTGAGCCTGCTCAGCAGGCTATGAGAAAGGCTCTGACACTGAGATATGCTCTGCTGCCTCATCTGTATACACTGTTTCATCAGGCTCATGTGGCTGGAGAGACAGTA |
| | GCTAGACCTCTGTTTCTGGAGTTTCCTAAGGATTCTTCTACATGGACAGTTGATCATCAGCTGCTGTGGGGAGAGGCTCTGCTGATTACACCTGTGCTGCAGGCTGGAAAGGCTGAGGTGACAGGATATTTTCCTCTGGGAACAT |
| | GGTATGATCTGCAGACAGTGCCTATAGAGGCTCTGGGATCTCTGCCTCCTCCTCCTGCTGCTCCTAGAGAGCCTGCTATTCATTCTGAGGGACAGTGGGTGACACTGCCTGCTCCTCTGGATACAATTAATGTGCATCTGAGAGC |
| | TGGATATATTATTCCTCTGCAGGGACCTGGACTGACAACAACAGAGTCTAGACAGCAGCCTATGGCTCTGGCTGTGGCTCTGACAAAGGGAGGAGAGGCTAGAGGAGAGCTGTTTTGGGATGATGGAGAGTCTCTGGAGGTGCTG |
| | GAGAGAGGAGCTTATACACAGGTGATTTTTCTGGCTAGAAATAATACAATTGTGAATGAGCTGGTGAGAGTGACATCTGAGGGAGCTGGACTGCAGCTGCAGAAGGTGACAGTGCTGGGAGTGGCTACAGCTCCTCAGCAGGTGC |
| | TGTCTAATGGAGTGCCTGTGTCTAATTTTACATATTCTCCTGATACAAAGGTGCTGGATATTTGTGTGTCTCTGCTGATGGGAGAGCAGTTTCTGGTGTCTTGGTGTTAATGATTTAAATCTCGAGCCGGGCGGAGTGTGTTAGT |
| | CTCTCCAGAGGGAGGCTGGTTCCCCAGGGAAGCAGAGCCTGTGTGCGGGCAGCAGCTGTGTGCGGGCCTGGGGGTTGTTAAGTGCAATTATTTTTAATAAAAGGGGCATTTGGAAAAAAAAAAAAAAGGTAGCAGTCGACAGATG |
| | AATTCTGCAGATCTGTGGCTTCTAGCTGCCCGGGTGGCATCCCTGTGACCCCTCCCCAGTGCCTCTCCTGGCCCTGGAAGTTGCCACTCCAGTGCCCACCAGCCTTGTCCTAATAAAATTAAGTTGCATCATTTTGTCTGACTAG |
| | GTGTCCTTCTATAATATTATGGGGTGGAGGGGGGTGGCATGGAGCAAGGGGCAAGTTGGGAAGACAACCTGTAGGGCCTGCGGGGTCTATTGGGAACCAAGCTGGAGTGCAGTGGCACAATCTTGGCTCACTGCAATCTCCGCCT |
| | CCTGGGTTCAAGCGATTCTCCTGCCTCAGCCTCCCGAGTTGTTGGGATTCCAGGCATGCATGACCAGGCTCAGCTAATTTTTGTTTTTTTGGTAGAGACGGGGTTTCACCATATTGGCCAGGCTGGTCTCCAACTCCTAATCTCA |
| | GGTGATCTACCCACCTTGGCCTCCCAAATTGCTGGGATTACAGGCGTGAACCACTGCTCCCTTCCCTGTCCTTCTGATTTTAAAAAAAAGAGAAATGTTCTGGCACCTGCACTTGCACTGGGGACAGCCTATTTTGCTAGTTTGT |
| | TTTGTTTCGTTTTGTTTTGATGGAGAGCGTATGTTGTTTAAACGCGGCCGCGTAGATAAGTAGCATGGCGGGTTAATCATTAACTACAAGGAACCCCTAGTGATGGAGTTGGCCACTCCCTCTCTGCGCGCTCGCTCGCTCACTG |
| | AGGCCGGGCGACCAAAGGTCGCCCGACGCCCGGGCTTTGCCCGGGCGGCCTCAGTGAGCGAGCGAGCGCGCAGTTAATTAAGGCGCCCTAGGCCGACCCTTAGACTCTGTACTCAGTTCTATAAACGAGCCATTGGATACGAGAT |
| | CCGTAGATTGATAAGGGACACGGAATATCCCCGGACGCAATAGACACCGGTGGACAGCTTGGTATCCTGAGCACAGTCGCGCGTCCGAATCTAGCTCTACTTTAGAGGCCCCGGATTCTGATGGTCGTAGACCGCAGAACCGATT |
| | GGGGGGATGAGATCTACTAGTTATCAGCACACAATTGCCCATTATACGCGCGTATAATGGACTATTGTGTGCTGATATAGGGATAACAGGGTAATTCTAGAGCTAGCATATGGATCCATCGATTTGATGCGGTATTTTCTCCTTA |
| | CGCATCTGTGCGGTATTTCACACCGCATACGTCAAAGCAACCATAGTACGCGCCCTGTAGCGGCGCATTAAGCGCGGCGGGTGTGGTGGTTACGCGCAGCGTGACCGCTACACTTGCCAGCGCCCTAGCGCCCGCTCCTTTCGCT |
| | TTCTTCCCTTCCTTTCTCGCCACGTTCGCCGGCTTTCCCCGTCAAGCTCTAAATCGGGGGCTCCCTTTAGGGTTCCGATTTAGTGCTTTACGGCACCTCGACCCCAAAAAACTTGATTTGGGTGATGGTTCACGTAGTGGGCCAT |
| | CGCCCTGATAGACGGTTTTTCGCCCTTTGACGTTGGAGTCCACGTTCTTTAATAGTGGACTCTTGTTCCAAACTGGAACAACACTCAACTCTATCTCGGGCTATTCTTTTGATTTATAAGGGATTTTGCCGATTTCGGTCTATTG |
| | GTTAAAAAATGAGCTGATTTAACAAAAATTTAACGCGAATTTTAACAAAATATTAACGTTTACAATTTTATGGTGCACTCTCAGTACAATCTGCTCTGATGCCGCATAGTTAAGCCAGCCCCGACACCCGCCAACACCCGCTGAC |
| | GCGCCCTGACGGGCTTGTCTGCTCCCGGCATCCGCTTACAGACAAGCTGTGACCGTCTCCGGGAGCTGCATGTGTCAGAGGTTTTCACCGTCATCACCGAAACGCGCGAGACGAAAGGGCCTCGTGATACGCCTATTTTTATAGG |
| | TTAATGTCATGATAATAATGGTTTCTTAGACGTCAGGTGGCACTTTTCGGGGAAATGTGCGCGGAACCCCTATTTGTTTATTTTTCTAAATACATTCAAATATGTATCCGCTCATGAGACAATAACCCTGATAAATGCTTCAATA |
| | ATATTGAAAAAGGAAGAGTATGAGCCATATTCAACGGGAAACGTCGAGGCCGCGATTAAATTCCAACATGGATGCTGATTTATATGGGTATAAATGGGCTCGCGATAATGTCGGGCAATCAGGTGCGACAATCTATCGCTTGTAT |
| | GGGAAGCCCGATGCGCCAGAGTTGTTTCTGAAACATGGCAAAGGTAGCGTTGCCAATGATGTTACAGATGAGATGGTCAGACTAAACTGGCTGACGGAATTTATGCCTCTTCCGACCATCAAGCATTTTATCCGTACTCCTGATG |
| | ATGCATGGTTACTCACCACTGCGATCCCCGGAAAAACAGCATTCCAGGTATTAGAAGAATATCCTGATTCAGGTGAAAATATTGTTGATGCGCTGGCAGTGTTCCTGCGCCGGTTGCATTCGATTCCTGTTTGTAATTGTCCTTT |
| | TAACAGCGATCGCGTATTTCGTCTCGCTCAGGCGCAATCACGAATGAATAACGGTTTGGTTGATGCGAGTGATTTTGATGACGAGCGTAATGGCTGGCCTGTTGAACAAGTCTGGAAAGAAATGCATAAACTTTTGCCATTCTCA |
| | CCGGATTCAGTCGTCACTCATGGTGATTTCTCACTTGATAACCTTATTTTTGACGAGGGGAAATTAATAGGTTGTATTGATGTTGGACGAGTCGGAATCGCAGACCGATACCAGGATCTTGCCATCCTATGGAACTGCCTCGGTG |
| | AGTTTTCTCCTTCATTACAGAAACGGCTTTTTCAAAAATATGGTATTGATAATCCTGATATGAATAAATTGCAGTTTCATTTGATGCTCGATGAGTTTTTCTAAGCGTATAATGGTCTAGAGCTAGCATATGGATCCATCGATTC |
| | CATTATACGCCTGTCAGACCAAGTTTACTCATATATACTTTAGATTGATTTAAAACTTCATTTTTAATTTAAAAGGATCTAGGTGAAGATCCTTTTTGATAATCTCATGACCAAAATCCCTTAACGTGAGTTTTCGTTCCACTGA |
| | GCGTCAGACCCCGTAGAAAAGATCAAAGGATCTTCTTGAGATCCTTTTTTTCTGCGCGTAATCTGCTGCTTGCAAACAAAAAAACCACCGCTACCAGCGGTGGTTTGTTTGCCGGATCAAGAGCTACCAACTCTTTTTCCGAAGG |
| | TAACTGGCTTCAGCAGAGCGCAGATACCAAATACTGTTCTTCTAGTGTAGCCGTAGTTAGGCCACCACTTCAAGAACTCTGTAGCACCGCCTACATACCTCGCTCTGCTAATCCTGTTACCAGTGGCTGCTGCCAGTGGCGATAA |
| | GTCGTGTCTTACCGGGTTGGACTCAAGACGATAGTTACCGGATAAGGCGCAGCGGTCGGGCTGAACGGGGGGTTCGTGCACACAGCCCAGCTTGGAGCGAACGACCTACACCGAACTGAGATACCTACAGCGTGAGCTATGAGAA |
| | AGCGCCACGCTTCCCGAAGGGAGAAAGGCGGACAGGTATCCGGTAAGCGGCAGGGTCGGAACAGGAGAGCGCACGAGGGAGCTTCCAGGGGGAAACGCCTGGTATCTTTATAGTCCTGTCGGGTTTCGCCACCTCTGACTTGAGC |
| | GTCGATTTTTGTGATGCTCGTCAGGGGGGCGGAGCCTATGGAAAAACGCCAGCAACGCGGCCTTTTTACGGTTCCTGGCCTTTTGCTGGCCTTTTGCTCACATGT |
| 29 | > coGAA plasmid construct |
| | TCTAGAGCTAGCATATGGATCCATCGATTTAGGGATAACAGGGTAATTATCAGCACACAATTGCCCATTATACGCGCGTATAATGGACTATTGTGTGCTGATATCTGTACACTTAAGGGCTAGATCTTAGCTTACGTCACTAGAG |
| | GGTCCACGTTTAGTTTTTAAGATCCATTGATCTCCTAAACGCTGCAAGATTCGCAACCTGGTATACTTAGCCTAGGCGCTAGGTCCTAGTGCAGCGGGACTTTTTTTCTAAAGTCGTTGAGAGGAGGAGTCGTCAGACCAGATAG |
| | CTTTGATGTCCTGATCGGAAGGATCGTTGGCCCCCCTGCAGGCAGCTGTTAATTAACTGCGCGCTCGCTCGCTCACTGAGGCCGCCCGGGCAAAGCCCGGGCGTCGGGCGACCTTTGGTCGCCCGGCCTCAGTGAGCGAGCGAGC |
| | GCGCAGAGAGGGAGTGGCCAACTCCATCACTAGGGGTTCCTTGTAGTTAATGATTAACCCGCCATGCTACTTATCTACGGCGCGCCACGCGTTCTAGGAGTTAATTTTTAAAAAGCAGTCAAAAGTCCAAGTGCCCTTGCGAGCA |
| | TTTACTCTCTCTGTTTGCTCTGGTTAATAATCTCAGGAGCACAAACATTCCTTACTAGTTCTAGGAGTTAATTTTTAAAAAGCAGTCAAAAGTCCAAGTGCCCTTGCGAGCATTTACTCTCTCTGTTTGCTCTGGTTAATAATCT |
| | CAGGAGCACAAACATTCCTTACTAGTTCTAGAGCGGCCGCCAGTGTGCTGGAATTCGGCTTTTTTAGGGCTGGAAGCTACCTTTGACATCATTTCCTCTGCGAATGCATGTATAATTTCTACAGAACCTATTAGAAAGGATCACC |
| | CAGCCTCTGCTTTTGTACAACTTTCCCTTAAAAAACTGCCAATCCCACTGCTGTTTGGCCCAATAGTGAGAACTTTTTCCTGCTGCCTCTTGGTGCTTTTGCCTATGGCCCCTATTCTGCCTGCTGAAGACACTCTTGCCAGCAT |
| | GGACTTAAACCCCTCCAGCTCTGACAATCCTCTTTCTCTTTTGTTTTACATGAAGGGTCTGGCAGCCAAAGCAATCACTCAAAGTTCAAACCTTATCATTTTTTGCTTTGTTCCTCTTGGCCTTGGTTTTGTACATCAGCTTTGA |
| | AAATACCATCCCAGGGTTAATGCTGGGGTTAATTTATAACTGAGAGTGCTCTAGTTCTGCAATACAGGACATGCTATAAAAATGGAAAGATGTTGCTTTCTGAGAGATCAGGTGGATTCTTGGGCATTTGCTTAAGCTTGGTACC |
| | GCCACCATGGGGGTGAGGCATCCTCCCTGCAGCCATAGGCTGCTGGCTGTGTGTGCCCTGGTGAGCCTGGCTACTGCTGCTCTGCTGGGGCACATCCTGCTGCATGATTTCCTGCTGGTGCCTAGGGAGCTGTCTGGCAGCAGCC |
| | CTGTCCTGGAGGAGACCCACCCTGCCCATCAGCAGGGGGCCTCTAGACCTGGCCCCAGGGATGCCCAGGCCCATCCTGGGAGGCCCAGGGCTGTGCCCACCCAGTGTGATGTGCCTCCCAACAGCAGGTTTGACTGTGCTCCTGA |
| | CAAAGCCATCACCCAGGAGCAGTGTGAAGCCAGGGGCTGTTGTTACATTCCTGCCAAGCAGGGCCTGCAGGGGGCCCAGATGGGCCAGCCCTGGTGCTTCTTCCCCCCTAGCTACCCCAGCTACAAGCTGGAGAATCTGAGCAGC |
| | TCTGAAATGGGCTACACTGCCACCCTGACTAGGACCACCCCCACCTTCTTCCCTAAGGATATCCTGACCCTGAGGCTGGATGTGATGATGGAGACTGAGAACAGGCTGCACTTCACCATCAAGGATCCTGCCAACAGGAGGTATG |
| | AGGTGCCCCTGGAGACCCCCAGGGTGCACAGCAGGGCTCCCTCTCCCCTGTATTCTGTGGAATTCTCTGAGGAGCCCTTTGGGGTGATTGTGCACAGGCAGCTGGATGGCAGAGTGCTGCTGAACACTACTGTGGCTCCCCTGTT |
| | CTTTGCTGATCAGTTCCTGCAGCTGAGCACTTCTCTGCCCAGCCAGTACATCACTGGGCTGGCTGAGCACCTGAGCCCTCTGATGCTGAGCACCAGCTGGACCAGGATCACCCTGTGGAACAGGGACCTGGCTCCCACCCCTGGG |
| | GCCAATCTGTATGGCAGCCACCCCTTCTACCTGGCTCTGGAGGATGGGGGCTCTGCCCATGGGGTGTTCCTGCTGAACTCTAATGCCATGGATGTGGTGCTGCAGCCCAGCCCTGCCCTGAGCTGGAGGAGCACTGGGGGCATCC |
| | TGGATGTGTACATCTTCCTGGGCCCTGAGCCCAAGTCTGTGGTCCAGCAGTATCTGGATGTGGTGGGGTACCCTTTCATGCCCCCCTACTGGGGCCTGGGCTTCCACCTGTGCAGGTGGGGGTACAGCAGCACTGCCATCACCAG |
| | GCAGGTGGTGGAGAATATGACCAGGGCCCACTTCCCCCTGGATGTGCAGTGGAATGATCTGGACTACATGGATTCTAGGAGGGACTTCACCTTCAACAAGGATGGCTTCAGGGACTTTCCTGCCATGGTGCAGGAGCTGCACCAG |
| | GGGGGCAGGAGGTACATGATGATTGTGGACCCAGCCATCTCTAGCTCTGGGCCAGCTGGCAGCTACAGGCCCTATGATGAGGGCCTGAGGAGGGGGGTGTTCATCACTAATGAGACTGGCCAGCCCCTGATTGGCAAGGTGTGGC |
| | CTGGGAGCACTGCCTTCCCTGACTTCACCAACCCCACTGCCCTGGCCTGGTGGGAGGATATGGTGGCTGAGTTCCATGACCAGGTGCCCTTTGATGGGATGTGGATTGACATGAATGAGCCCTCTAACTTTATTAGGGGCTCTGA |
| | GGATGGGTGCCCTAACAATGAGCTGGAGAACCCCCCTTATGTGCCTGGGGTGGTGGGGGGCACCCTGCAGGCTGCCACCATCTGTGCCAGCAGCCACCAGTTCCTGTCTACCCACTACAACCTGCACAATCTGTATGGGCTGACT |
| | GAGGCTATTGCCAGCCACAGGGCCCTGGTGAAGGCTAGGGGGACCAGGCCTTTTGTGATCAGCAGGAGCACCTTTGCTGGGCATGGCAGATATGCTGGCCATTGGACTGGGGATGTGTGGTCTAGCTGGGAGCAGCTGGCCAGCT |
| | CTGTGCCTGAGATCCTGCAGTTCAATCTGCTGGGGGTGCCCCTGGTGGGGGCTGATGTGTGTGGGTTCCTGGGCAATACCTCTGAGGAGCTGTGTGTGAGGTGGACCCAGCTGGGGGCCTTCTACCCCTTCATGAGGAACCACAA |
| | CAGCCTGCTGAGCCTGCCTCAGGAGCCCTATTCTTTTTCTGAGCCTGCCCAGCAGGCTATGAGGAAGGCCCTGACTCTGAGGTATGCCCTGCTGCCTCACCTGTACACCCTGTTCCACCAGGCCCATGTGGCTGGGGAGACTGTG |
| | GCCAGGCCCCTGTTCCTGGAGTTCCCCAAGGATAGCTCTACCTGGACTGTGGACCATCAGCTGCTGTGGGGGGAGGCCCTGCTGATCACCCCTGTGCTGCAGGCTGGCAAGGCTGAGGTGACTGGCTACTTTCCTCTGGGCACCT |
| | GGTATGATCTGCAGACTGTGCCCATTGAAGCCCTGGGCAGCCTGCCTCCTCCCCCTGCTGCCCCTAGGGAGCCTGCCATCCACTCTGAGGGCCAGTGGGTGACCCTGCCAGCCCCTCTGGACACCATCAATGTGCATCTGAGGGC |
| | TGGCTACATCATTCCCCTGCAGGGCCCTGGGCTGACCACCACTGAGAGCAGGCAGCAGCCCATGGCTCTGGCTGTGGCCCTGACCAAGGGGGGGGAGGCCAGGGGGGAGCTGTTCTGGGATGATGGGGAGAGCCTGGAGGTGCTG |
| | GAGAGGGGGGCCTACACCCAGGTGATCTTCCTGGCCAGGAATAATACCATTGTGAATGAGCTGGTGAGGGTGACTTCTGAGGGGGCTGGCCTGCAGCTGCAGAAGGTGACTGTGCTGGGGGTGGCTACTGCTCCTCAGCAGGTGC |
| | TGTCTAATGGGGTGCCTGTGAGCAACTTCACTTACAGCCCTGACACTAAGGTGCTGGACATTTGTGTGAGCCTGCTGATGGGGGAGCAGTTCCTGGTGTCTTGGTGCTGATTTAAATCTCGAGCCGGGCGGAGTGTGTTAGTCTC |
| | TCCAGAGGGAGGCTGGTTCCCCAGGGAAGCAGAGCCTGTGTGCGGGCAGCAGCTGTGTGCGGGCCTGGGGGTTGTTAAGTGCAATTATTTTTAATAAAAGGGGCATTTGGAAAAAAAAAAAAAAGGTAGCAGTCGACAGATGAAT |
| | TCTGCAGATCTGTGGCTTCTAGCTGCCCGGGTGGCATCCCTGTGACCCCTCCCCAGTGCCTCTCCTGGCCCTGGAAGTTGCCACTCCAGTGCCCACCAGCCTTGTCCTAATAAAATTAAGTTGCATCATTTTGTCTGACTAGGTG |
| | TCCTTCTATAATATTATGGGGTGGAGGGGGGTGGTATGGAGCAAGGGGCAAGTTGGGAAGACAACCTGTAGGGCCTGCGGGGTCTATTGGGAACCAAGCTGGAGTGCAGTGGCACAATCTTGGCTCACTGCAATCTCCGCCTCCT |
| | GGGTTCAAGCGATTCTCCTGCCTCAGCCTCCCGAGTTGTTGGGATTCCAGGCATGCATGACCAGGCTCAGCTAATTTTTGTTTTTTTGGTAGAGACGGGGTTTCACCATATTGGCCAGGCTGGTCTCCAACTCCTAATCTCAGGT |
| | GATCTACCCACCTTGGCCTCCCAAATTGCTGGGATTACAGGCGTGAACCACTGCTCCCTTCCCTGTCCTTCTGATTTTAAAAAAAAGAGAAATGTTCTGGCACCTGCACTTGCACTGGGGACAGCCTATTTTGCTAGTTTGTTTT |
| | GTTTCGTTTTGTTTTGATGGAGAGCGTATGTTGTTTAAACGCGGCCGCGTAGATAAGTAGCATGGCGGGTTAATCATTAACTACAAGGAACCCCTAGTGATGGAGTTGGCCACTCCCTCTCTGCGCGCTCGCTCGCTCACTGAGG |
| | CCGGGCGACCAAAGGTCGCCCGACGCCCGGGCTTTGCCCGGGCGGCCTCAGTGAGCGAGCGAGCGCGCAGTTAATTAAGGCGCCCTAGGCCGACCCTTAGACTCTGTACTCAGTTCTATAAACGAGCCATTGGATACGAGATCCG |
| | TAGATTGATAAGGGACACGGAATATCCCCGGACGCAATAGACACCGGTGGACAGCTTGGTATCCTGAGCACAGTCGCGCGTCCGAATCTAGCTCTACTTTAGAGGCCCCGGATTCTGATGGTCGTAGACCGCAGAACCGATTGGG |
| | GGGATGAGATCTACTAGTTATCAGCACACAATTGCCCATTATACGCGCGTATAATGGACTATTGTGTGCTGATATAGGGATAACAGGGTAATTCTAGAGCTAGCATATGGATCCATCGATTTGATGCGGTATTTTCTCCTTACGC |
| | ATCTGTGCGGTATTTCACACCGCATACGTCAAAGCAACCATAGTACGCGCCCTGTAGCGGCGCATTAAGCGCGGCGGGTGTGGTGGTTACGCGCAGCGTGACCGCTACACTTGCCAGCGCCCTAGCGCCCGCTCCTTTCGCTTTC |
| | TTCCCTTCCTTTCTCGCCACGTTCGCCGGCTTTCCCCGTCAAGCTCTAAATCGGGGGCTCCCTTTAGGGTTCCGATTTAGTGCTTTACGGCACCTCGACCCCAAAAAACTTGATTTGGGTGATGGTTCACGTAGTGGGCCATCGC |
| | CCTGATAGACGGTTTTTCGCCCTTTGACGTTGGAGTCCACGTTCTTTAATAGTGGACTCTTGTTCCAAACTGGAACAACACTCAACTCTATCTCGGGCTATTCTTTTGATTTATAAGGGATTTTGCCGATTTCGGTCTATTGGTT |
| | AAAAAATGAGCTGATTTAACAAAAATTTAACGCGAATTTTAACAAAATATTAACGTTTACAATTTTATGGTGCACTCTCAGTACAATCTGCTCTGATGCCGCATAGTTAAGCCAGCCCCGACACCCGCCAACACCCGCTGACGCG |
| | CCCTGACGGGCTTGTCTGCTCCCGGCATCCGCTTACAGACAAGCTGTGACCGTCTCCGGGAGCTGCATGTGTCAGAGGTTTTCACCGTCATCACCGAAACGCGCGAGACGAAAGGGCCTCGTGATACGCCTATTTTTATAGGTTA |
| | ATGTCATGATAATAATGGTTTCTTAGACGTCAGGTGGCACTTTTCGGGGAAATGTGCGCGGAACCCCTATTTGTTTATTTTTCTAAATACATTCAAATATGTATCCGCTCATGAGACAATAACCCTGATAAATGCTTCAATAATA |
| | TTGAAAAAGGAAGAGTATGAGCCATATTCAACGGGAAACGTCGAGGCCGCGATTAAATTCCAACATGGATGCTGATTTATATGGGTATAAATGGGCTCGCGATAATGTCGGGCAATCAGGTGCGACAATCTATCGCTTGTATGGG |
| | AAGCCCGATGCGCCAGAGTTGTTTCTGAAACATGGCAAAGGTAGCGTTGCCAATGATGTTACAGATGAGATGGTCAGACTAAACTGGCTGACGGAATTTATGCCTCTTCCGACCATCAAGCATTTTATCCGTACTCCTGATGATG |
| | CATGGTTACTCACCACTGCGATCCCCGGAAAAACAGCATTCCAGGTATTAGAAGAATATCCTGATTCAGGTGAAAATATTGTTGATGCGCTGGCAGTGTTCCTGCGCCGGTTGCATTCGATTCCTGTTTGTAATTGTCCTTTTAA |
| | CAGCGATCGCGTATTTCGTCTCGCTCAGGCGCAATCACGAATGAATAACGGTTTGGTTGATGCGAGTGATTTTGATGACGAGCGTAATGGCTGGCCTGTTGAACAAGTCTGGAAAGAAATGCATAAACTTTTGCCATTCTCACCG |
| | GATTCAGTCGTCACTCATGGTGATTTCTCACTTGATAACCTTATTTTTGACGAGGGGAAATTAATAGGTTGTATTGATGTTGGACGAGTCGGAATCGCAGACCGATACCAGGATCTTGCCATCCTATGGAACTGCCTCGGTGAGT |
| | TTTCTCCTTCATTACAGAAACGGCTTTTTCAAAAATATGGTATTGATAATCCTGATATGAATAAATTGCAGTTTCATTTGATGCTCGATGAGTTTTTCTAAGCGTATAATGGTCTAGAGCTAGCATATGGATCCATCGATTCCAT |
| | TATACGCCTGTCAGACCAAGTTTACTCATATATACTTTAGATTGATTTAAAACTTCATTTTTAATTTAAAAGGATCTAGGTGAAGATCCTTTTTGATAATCTCATGACCAAAATCCCTTAACGTGAGTTTTCGTTCCACTGAGCG |
| | TCAGACCCCGTAGAAAAGATCAAAGGATCTTCTTGAGATCCTTTTTTTCTGCGCGTAATCTGCTGCTTGCAAACAAAAAAACCACCGCTACCAGCGGTGGTTTGTTTGCCGGATCAAGAGCTACCAACTCTTTTTCCGAAGGTAA |
| | CTGGCTTCAGCAGAGCGCAGATACCAAATACTGTTCTTCTAGTGTAGCCGTAGTTAGGCCACCACTTCAAGAACTCTGTAGCACCGCCTACATACCTCGCTCTGCTAATCCTGTTACCAGTGGCTGCTGCCAGTGGCGATAAGTC |
| | GTGTCTTACCGGGTTGGACTCAAGACGATAGTTACCGGATAAGGCGCAGCGGTCGGGCTGAACGGGGGGTTCGTGCACACAGCCCAGCTTGGAGCGAACGACCTACACCGAACTGAGATACCTACAGCGTGAGCTATGAGAAAGC |
| | GCCACGCTTCCCGAAGGGAGAAAGGCGGACAGGTATCCGGTAAGCGGCAGGGTCGGAACAGGAGAGCGCACGAGGGAGCTTCCAGGGGGAAACGCCTGGTATCTTTATAGTCCTGTCGGGTTTCGCCACCTCTGACTTGAGCGTC |
| | GATTTTTGTGATGCTCGTCAGGGGGGCGGAGCCTATGGAAAAACGCCAGCAACGCGGCCTTTTTACGGTTCCTGGCCTTTTGCTGGCCTTTTGCTCACATGT |
| 30 | > coGAA plasmid construct |
| | TCTAGAGCTAGCATATGGATCCATCGATTTAGGGATAACAGGGTAATTATCAGCACACAATTGCCCATTATACGCGCGTATAATGGACTATTGTGTGCTGATATCTGTACACTTAAGGGCTAGATCTTAGCTTACGTCACTAGAG |
| | GGTCCACGTTTAGTTTTTAAGATCCATTGATCTCCTAAACGCTGCAAGATTCGCAACCTGGTATACTTAGCCTAGGCGCTAGGTCCTAGTGCAGCGGGACTTTTTTTCTAAAGTCGTTGAGAGGAGGAGTCGTCAGACCAGATAG |
| | CTTTGATGTCCTGATCGGAAGGATCGTTGGCCCCCCTGCAGGCAGCTGTTAATTAACTGCGCGCTCGCTCGCTCACTGAGGCCGCCCGGGCAAAGCCCGGGCGTCGGGCGACCTTTGGTCGCCCGGCCTCAGTGAGCGAGCGAGC |
| | GCGCAGAGAGGGAGTGGCCAACTCCATCACTAGGGGTTCCTTGTAGTTAATGATTAACCCGCCATGCTACTTATCTACGGCGCGCCACGCGTTCTAGGAGTTAATTTTTAAAAAGCAGTCAAAAGTCCAAGTGCCCTTGCGAGCA |
| | TTTACTCTCTCTGTTTGCTCTGGTTAATAATCTCAGGAGCACAAACATTCCTTACTAGTTCTAGGAGTTAATTTTTAAAAAGCAGTCAAAAGTCCAAGTGCCCTTGCGAGCATTTACTCTCTCTGTTTGCTCTGGTTAATAATCT |
| | CAGGAGCACAAACATTCCTTACTAGTTCTAGAGCGGCCGCCAGTGTGCTGGAATTCGGCTTTTTTAGGGCTGGAAGCTACCTTTGACATCATTTCCTCTGCGAATGCATGTATAATTTCTACAGAACCTATTAGAAAGGATCACC |
| | CAGCCTCTGCTTTTGTACAACTTTCCCTTAAAAAACTGCCAATCCCACTGCTGTTTGGCCCAATAGTGAGAACTTTTTCCTGCTGCCTCTTGGTGCTTTTGCCTATGGCCCCTATTCTGCCTGCTGAAGACACTCTTGCCAGCAT |
| | GGACTTAAACCCCTCCAGCTCTGACAATCCTCTTTCTCTTTTGTTTTACATGAAGGGTCTGGCAGCCAAAGCAATCACTCAAAGTTCAAACCTTATCATTTTTTGCTTTGTTCCTCTTGGCCTTGGTTTTGTACATCAGCTTTGA |
| | AAATACCATCCCAGGGTTAATGCTGGGGTTAATTTATAACTGAGAGTGCTCTAGTTCTGCAATACAGGACATGCTATAAAAATGGAAAGATGTTGCTTTCTGAGAGATCAGGTGGATTCTTGGGCATTTGCTTAAGCTTGGTACC |
| | GCCACCATGGGGGTGAGGCACCCCCCCTGCTCTCACAGGCTGCTGGCTGTGTGTGCCCTGGTGAGCCTGGCCACTGCTGCTCTGCTGGGGCACATCCTGCTGCATGACTTCCTGCTGGTGCCCAGGGAGCTGTCTGGCAGCTCTC |
| | CTGTGCTGGAGGAAACTCATCCTGCCCATCAGCAGGGGGCCTCTAGGCCAGGCCCCAGGGATGCCCAGGCCCATCCTGGCAGGCCCAGAGCTGTGCCCACCCAGTGTGATGTGCCCCCCAACAGCAGGTTTGATTGTGCCCCTGA |
| | TAAGGCCATCACCCAGGAGCAGTGTGAGGCCAGGGGCTGCTGCTACATCCCTGCCAAGCAGGGGCTGCAGGGGGCCCAGATGGGCCAGCCCTGGTGCTTCTTCCCCCCTTCTTACCCCAGCTACAAGCTGGAGAACCTGTCTTCT |
| | TCTGAGATGGGCTATACTGCCACCCTGACCAGGACCACTCCCACCTTCTTCCCCAAGGACATCCTGACTCTGAGACTGGATGTGATGATGGAGACTGAGAACAGGCTGCACTTCACCATCAAGGACCCTGCCAACAGGAGGTATG |
| | AGGTGCCTCTGGAGACTCCTAGAGTGCACAGCAGGGCTCCCTCTCCCCTGTACTCTGTGGAGTTCTCTGAGGAGCCCTTTGGGGTGATTGTGCACAGACAGCTGGATGGGAGGGTGCTGCTGAACACCACTGTGGCCCCCCTGTT |
| | CTTTGCTGACCAGTTCCTGCAGCTGTCTACCTCTCTGCCCAGCCAGTACATTACTGGGCTGGCTGAACATCTGTCTCCCCTGATGCTGAGCACCAGCTGGACCAGGATCACTCTGTGGAACAGGGACCTGGCCCCCACTCCTGGG |
| | GCCAATCTGTATGGGAGCCACCCATTCTACCTGGCCCTGGAGGATGGGGGCTCTGCCCATGGGGTGTTCCTGCTGAACAGCAATGCCATGGATGTGGTGCTGCAGCCTTCCCCTGCCCTGAGCTGGAGGTCTACTGGGGGCATCC |
| | TGGATGTGTACATTTTCCTGGGCCCTGAGCCCAAGTCTGTGGTGCAGCAGTACCTGGATGTGGTGGGGTACCCTTTCATGCCTCCCTACTGGGGCCTGGGCTTTCACCTGTGCAGGTGGGGCTATTCTAGCACTGCCATCACCAG |
| | GCAGGTGGTGGAGAACATGACTAGGGCTCATTTCCCCCTGGATGTGCAGTGGAATGATCTGGATTATATGGACTCTAGGAGGGACTTTACTTTCAATAAGGATGGCTTCAGGGATTTTCCTGCTATGGTGCAGGAGCTGCACCAG |
| | GGGGGCAGGAGGTATATGATGATTGTGGATCCTGCCATCTCTAGCTCTGGGCCTGCTGGCTCTTACAGGCCCTATGATGAGGGGCTGAGGAGGGGGGTGTTTATTACTAATGAGACTGGCCAGCCTCTGATTGGGAAGGTGTGGC |
| | CTGGCAGCACTGCCTTCCCAGACTTCACCAACCCCACTGCCCTGGCCTGGTGGGAGGACATGGTGGCTGAGTTCCATGACCAGGTGCCCTTTGATGGGATGTGGATTGATATGAATGAGCCCTCTAACTTCATTAGGGGCTCTGA |
| | GGATGGCTGCCCCAACAATGAGCTGGAGAACCCCCCATATGTGCCTGGGGTGGTGGGGGGGACCCTGCAGGCTGCTACCATCTGTGCTAGCTCTCACCAGTTCCTGAGCACCCACTACAACCTGCACAATCTGTATGGCCTGACT |
| | GAGGCCATTGCCAGCCATAGGGCCCTGGTGAAGGCCAGGGGGACCAGACCCTTTGTGATCTCCAGGAGCACCTTTGCTGGCCATGGGAGATATGCTGGCCATTGGACTGGGGATGTGTGGTCTAGCTGGGAGCAGCTGGCCAGCT |
| | CTGTGCCTGAGATCCTGCAGTTCAATCTGCTGGGGGTGCCTCTGGTGGGGGCTGATGTGTGTGGCTTCCTGGGCAACACCTCTGAAGAACTGTGTGTGAGATGGACCCAGCTGGGGGCCTTCTACCCCTTCATGAGGAACCACAA |
| | CAGCCTGCTGTCTCTGCCCCAGGAGCCTTACTCTTTTTCTGAGCCTGCCCAGCAGGCCATGAGGAAGGCCCTGACCCTGAGATATGCCCTGCTGCCTCACCTGTACACCCTGTTCCACCAGGCCCATGTGGCTGGGGAGACTGTG |
| | GCCAGGCCCCTGTTCCTGGAGTTCCCCAAGGACAGCAGCACCTGGACTGTGGACCACCAGCTGCTGTGGGGGGAGGCCCTGCTGATCACCCCTGTGCTGCAGGCTGGGAAGGCTGAGGTGACTGGCTACTTCCCCCTGGGCACCT |
| | GGTATGATCTGCAGACTGTGCCCATTGAGGCCCTGGGGTCTCTGCCCCCCCCCCCTGCTGCTCCCAGAGAGCCTGCCATCCATTCTGAGGGCCAGTGGGTGACCCTGCCTGCCCCCCTGGACACCATTAATGTGCACCTGAGGGC |
| | TGGCTACATTATCCCCCTGCAGGGCCCTGGCCTGACCACCACTGAGAGCAGGCAGCAGCCTATGGCTCTGGCTGTGGCCCTGACCAAGGGGGGGGAGGCCAGGGGGGAGCTGTTTTGGGATGATGGGGAGAGCCTGGAGGTGCTG |
| | GAGAGGGGGGCCTACACCCAGGTGATCTTCCTGGCCAGGAACAACACTATTGTGAATGAACTGGTGAGGGTCACTTCTGAGGGGGCTGGGCTGCAGCTGCAGAAGGTGACTGTGCTGGGGGTGGCCACTGCTCCCCAGCAGGTGC |
| | TGAGCAATGGGGTGCCTGTGAGCAACTTCACCTACAGCCCTGATACCAAGGTGCTGGACATCTGTGTGAGCCTGCTGATGGGGGAGCAGTTCCTGGTGAGCTGGTGCTGATTTAAATCTCGAGCCGGGCGGAGTGTGTTAGTCTC |
| | TCCAGAGGGAGGCTGGTTCCCCAGGGAAGCAGAGCCTGTGTGCGGGCAGCAGCTGTGTGCGGGCCTGGGGGTTGTTAAGTGCAATTATTTTTAATAAAAGGGGCATTTGGAAAAAAAAAAAAAAGGTAGCAGTCGACAGATGAAT |
| | TCTGCAGATCTGTGGCTTCTAGCTGCCCGGGTGGCATCCCTGTGACCCCTCCCCAGTGCCTCTCCTGGCCCTGGAAGTTGCCACTCCAGTGCCCACCAGCCTTGTCCTAATAAAATTAAGTTGCATCATTTTGTCTGACTAGGTG |
| | TCCTTCTATAATATTATGGGGTGGAGGGGGGTGGTATGGAGCAAGGGGCAAGTTGGGAAGACAACCTGTAGGGCCTGCGGGGTCTATTGGGAACCAAGCTGGAGTGCAGTGGCACAATCTTGGCTCACTGCAATCTCCGCCTCCT |
| | GGGTTCAAGCGATTCTCCTGCCTCAGCCTCCCGAGTTGTTGGGATTCCAGGCATGCATGACCAGGCTCAGCTAATTTTTGTTTTTTTGGTAGAGACGGGGTTTCACCATATTGGCCAGGCTGGTCTCCAACTCCTAATCTCAGGT |
| | GATCTACCCACCTTGGCCTCCCAAATTGCTGGGATTACAGGCGTGAACCACTGCTCCCTTCCCTGTCCTTCTGATTTTAAAAAAAAGAGAAATGTTCTGGCACCTGCACTTGCACTGGGGACAGCCTATTTTGCTAGTTTGTTTT |
| | GTTTCGTTTTGTTTTGATGGAGAGCGTATGTTGTTTAAACGCGGCCGCGTAGATAAGTAGCATGGCGGGTTAATCATTAACTACAAGGAACCCCTAGTGATGGAGTTGGCCACTCCCTCTCTGCGCGCTCGCTCGCTCACTGAGG |
| | CCGGGCGACCAAAGGTCGCCCGACGCCCGGGCTTTGCCCGGGCGGCCTCAGTGAGCGAGCGAGCGCGCAGTTAATTAAGGCGCCCTAGGCCGACCCTTAGACTCTGTACTCAGTTCTATAAACGAGCCATTGGATACGAGATCCG |
| | TAGATTGATAAGGGACACGGAATATCCCCGGACGCAATAGACACCGGTGGACAGCTTGGTATCCTGAGCACAGTCGCGCGTCCGAATCTAGCTCTACTTTAGAGGCCCCGGATTCTGATGGTCGTAGACCGCAGAACCGATTGGG |
| | GGGATGAGATCTACTAGTTATCAGCACACAATTGCCCATTATACGCGCGTATAATGGACTATTGTGTGCTGATATAGGGATAACAGGGTAATTCTAGAGCTAGCATATGGATCCATCGATTTGATGCGGTATTTTCTCCTTACGC |
| | ATCTGTGCGGTATTTCACACCGCATACGTCAAAGCAACCATAGTACGCGCCCTGTAGCGGCGCATTAAGCGCGGCGGGTGTGGTGGTTACGCGCAGCGTGACCGCTACACTTGCCAGCGCCCTAGCGCCCGCTCCTTTCGCTTTC |
| | TTCCCTTCCTTTCTCGCCACGTTCGCCGGCTTTCCCCGTCAAGCTCTAAATCGGGGGCTCCCTTTAGGGTTCCGATTTAGTGCTTTACGGCACCTCGACCCCAAAAAACTTGATTTGGGTGATGGTTCACGTAGTGGGCCATCGC |
| | CCTGATAGACGGTTTTTCGCCCTTTGACGTTGGAGTCCACGTTCTTTAATAGTGGACTCTTGTTCCAAACTGGAACAACACTCAACTCTATCTCGGGCTATTCTTTTGATTTATAAGGGATTTTGCCGATTTCGGTCTATTGGTT |
| | AAAAAATGAGCTGATTTAACAAAAATTTAACGCGAATTTTAACAAAATATTAACGTTTACAATTTTATGGTGCACTCTCAGTACAATCTGCTCTGATGCCGCATAGTTAAGCCAGCCCCGACACCCGCCAACACCCGCTGACGCG |
| | CCCTGACGGGCTTGTCTGCTCCCGGCATCCGCTTACAGACAAGCTGTGACCGTCTCCGGGAGCTGCATGTGTCAGAGGTTTTCACCGTCATCACCGAAACGCGCGAGACGAAAGGGCCTCGTGATACGCCTATTTTTATAGGTTA |
| | ATGTCATGATAATAATGGTTTCTTAGACGTCAGGTGGCACTTTTCGGGGAAATGTGCGCGGAACCCCTATTTGTTTATTTTTCTAAATACATTCAAATATGTATCCGCTCATGAGACAATAACCCTGATAAATGCTTCAATAATA |
| | TTGAAAAAGGAAGAGTATGAGCCATATTCAACGGGAAACGTCGAGGCCGCGATTAAATTCCAACATGGATGCTGATTTATATGGGTATAAATGGGCTCGCGATAATGTCGGGCAATCAGGTGCGACAATCTATCGCTTGTATGGG |
| | AAGCCCGATGCGCCAGAGTTGTTTCTGAAACATGGCAAAGGTAGCGTTGCCAATGATGTTACAGATGAGATGGTCAGACTAAACTGGCTGACGGAATTTATGCCTCTTCCGACCATCAAGCATTTTATCCGTACTCCTGATGATG |
| | CATGGTTACTCACCACTGCGATCCCCGGAAAAACAGCATTCCAGGTATTAGAAGAATATCCTGATTCAGGTGAAAATATTGTTGATGCGCTGGCAGTGTTCCTGCGCCGGTTGCATTCGATTCCTGTTTGTAATTGTCCTTTTAA |
| | CAGCGATCGCGTATTTCGTCTCGCTCAGGCGCAATCACGAATGAATAACGGTTTGGTTGATGCGAGTGATTTTGATGACGAGCGTAATGGCTGGCCTGTTGAACAAGTCTGGAAAGAAATGCATAAACTTTTGCCATTCTCACCG |
| | GATTCAGTCGTCACTCATGGTGATTTCTCACTTGATAACCTTATTTTTGACGAGGGGAAATTAATAGGTTGTATTGATGTTGGACGAGTCGGAATCGCAGACCGATACCAGGATCTTGCCATCCTATGGAACTGCCTCGGTGAGT |
| | TTTCTCCTTCATTACAGAAACGGCTTTTTCAAAAATATGGTATTGATAATCCTGATATGAATAAATTGCAGTTTCATTTGATGCTCGATGAGTTTTTCTAAGCGTATAATGGTCTAGAGCTAGCATATGGATCCATCGATTCCAT |
| | TATACGCCTGTCAGACCAAGTTTACTCATATATACTTTAGATTGATTTAAAACTTCATTTTTAATTTAAAAGGATCTAGGTGAAGATCCTTTTTGATAATCTCATGACCAAAATCCCTTAACGTGAGTTTTCGTTCCACTGAGCG |
| | TCAGACCCCGTAGAAAAGATCAAAGGATCTTCTTGAGATCCTTTTTTTCTGCGCGTAATCTGCTGCTTGCAAACAAAAAAACCACCGCTACCAGCGGTGGTTTGTTTGCCGGATCAAGAGCTACCAACTCTTTTTCCGAAGGTAA |
| | CTGGCTTCAGCAGAGCGCAGATACCAAATACTGTTCTTCTAGTGTAGCCGTAGTTAGGCCACCACTTCAAGAACTCTGTAGCACCGCCTACATACCTCGCTCTGCTAATCCTGTTACCAGTGGCTGCTGCCAGTGGCGATAAGTC |
| | GTGTCTTACCGGGTTGGACTCAAGACGATAGTTACCGGATAAGGCGCAGCGGTCGGGCTGAACGGGGGGTTCGTGCACACAGCCCAGCTTGGAGCGAACGACCTACACCGAACTGAGATACCTACAGCGTGAGCTATGAGAAAGC |
| | GCCACGCTTCCCGAAGGGAGAAAGGCGGACAGGTATCCGGTAAGCGGCAGGGTCGGAACAGGAGAGCGCACGAGGGAGCTTCCAGGGGGAAACGCCTGGTATCTTTATAGTCCTGTCGGGTTTCGCCACCTCTGACTTGAGCGTC |
| | GATTTTTGTGATGCTCGTCAGGGGGGCGGAGCCTATGGAAAAACGCCAGCAACGCGGCCTTTTTACGGTTCCTGGCCTTTTGCTGGCCTTTTGCTCACATGT |
| 31 | > ITR-to-ITR construct with coGAA GAA nucleic acid w/201 signal peptide |
| | CTGCGCGCTCGCTCGCTCACTGAGGCCGCCCGGGCAAAGCCCGGGCGTCGGGCGACCTTTGGTCGCCCGGCCTCAGTGAGCGAGCGAGCGCGCAGAGAGGGAGTGGCCAACTCCATCACTAGGGGTTCCTTGTAGTTAATGATTAA |
| | CCCGCCATGCTACTTATCTACGGCGCGCCACGCGTTCTAGGAGTTAATTTTTAAAAAGCAGTCAAAAGTCCAAGTGCCCTTGCGAGCATTTACTCTCTCTGTTTGCTCTGGTTAATAATCTCAGGAGCACAAACATTCCTTACTAG |
| | TTCTAGGAGTTAATTTTTAAAAAGCAGTCAAAAGTCCAAGTGCCCTTGCGAGCATTTACTCTCTCTGTTTGCTCTGGTTAATAATCTCAGGAGCACAAACATTCCTTACTAGTTCTAGAGCGGCCGCCAGTGTGCTGGAATTCGGC |
| | TTTTTTAGGGCTGGAAGCTACCTTTGACATCATTTCCTCTGCGAATGCATGTATAATTTCTACAGAACCTATTAGAAAGGATCACCCAGCCTCTGCTTTTGTACAACTTTCCCTTAAAAAACTGCCAATCCCACTGCTGTTTGGCC |
| | CAATAGTGAGAACTTTTTCCTGCTGCCTCTTGGTGCTTTTGCCTATGGCCCCTATTCTGCCTGCTGAAGACACTCTTGCCAGCATGGACTTAAACCCCTCCAGCTCTGACAATCCTCTTTCTCTTTTGTTTTACATGAAGGGTCTG |
| | GCAGCCAAAGCAATCACTCAAAGTTCAAACCTTATCATTTTTTGCTTTGTTCCTCTTGGCCTTGGTTTTGTACATCAGCTTTGAAAATACCATCCCAGGGTTAATGCTGGGGTTAATTTATAACTGAGAGTGCTCTAGTTCTGCAA |
| | TACAGGACATGCTATAAAAATGGAAAGATGTTGCTTTCTGAGAGATCAGGTGGATTCTTGGGCATTTGCTTAAGCTTGGTACCGCCACCATGGAGTTTGGGCTGAGCTGGGTCTTTCTGGTGGCCCTGCTGAAGGGAGTCCAGTGT |
| | GAGCAGCAGGGGGCCAGCAGGCCAGGCCCCAGGGATGCCCAGGCCCACCCTGGCAGACCCAGGGCTGTGCCCACCCAGTGTGATGTGCCTCCCAACAGCAGATTTGACTGTGCCCCTGATAAGGCCATTACTCAGGAACAGTGTGA |
| | GGCCAGGGGCTGCTGCTATATCCCTGCCAAGCAGGGCCTGCAGGGGGCCCAGATGGGGCAGCCCTGGTGCTTCTTCCCCCCCAGCTACCCCTCTTATAAGCTGGAGAATCTGAGCAGCTCTGAAATGGGCTACACTGCCACTCTGA |
| | CCAGGACTACCCCCACCTTCTTCCCCAAGGATATTCTGACTCTGAGGCTGGATGTGATGATGGAGACTGAGAACAGGCTGCACTTCACCATCAAGGACCCTGCCAACAGGAGGTATGAGGTGCCCCTGGAAACTCCCAGGGTGCAC |
| | TCTAGGGCCCCCAGCCCCCTGTATTCTGTGGAGTTCTCTGAGGAGCCTTTTGGGGTCATTGTCCACAGGCAGCTGGATGGCAGGGTGCTGCTGAATACTACTGTGGCCCCTCTGTTCTTTGCTGACCAGTTCCTGCAGCTGAGCAC |
| | CAGCCTGCCTTCTCAGTACATTACTGGCCTGGCTGAGCATCTGAGCCCCCTGATGCTGAGCACCTCTTGGACCAGAATCACCCTGTGGAACAGGGACCTGGCTCCCACTCCTGGGGCCAACCTGTATGGCAGCCACCCCTTCTACC |
| | TGGCCCTGGAGGATGGGGGCTCTGCCCATGGGGTGTTCCTGCTGAACAGCAATGCCATGGATGTGGTGCTGCAGCCCTCTCCTGCCCTGTCTTGGAGATCTACTGGGGGCATCCTGGATGTGTATATCTTCCTGGGGCCTGAGCCC |
| | AAGTCTGTGGTGCAGCAGTACCTGGATGTGGTGGGCTACCCCTTCATGCCCCCCTACTGGGGCCTGGGCTTCCACCTGTGCAGGTGGGGCTACTCTTCTACTGCTATCACCAGGCAGGTGGTGGAGAACATGACCAGGGCTCACTT |
| | CCCTCTGGATGTGCAGTGGAATGACCTGGACTACATGGACTCTAGGAGAGACTTCACTTTTAATAAGGATGGGTTCAGGGACTTTCCTGCCATGGTGCAGGAGCTGCATCAGGGGGGCAGGAGATATATGATGATTGTGGACCCTG |
| | CTATTTCTAGCTCTGGCCCTGCTGGCAGCTATAGGCCCTATGATGAGGGGCTGAGGAGGGGGGTGTTCATCACTAATGAGACTGGCCAGCCCCTGATTGGCAAGGTGTGGCCTGGCTCTACTGCCTTCCCTGATTTCACCAACCCC |
| | ACTGCCCTGGCCTGGTGGGAGGATATGGTGGCTGAGTTTCATGACCAGGTGCCCTTTGATGGCATGTGGATTGACATGAATGAGCCCAGCAACTTTATCAGGGGCTCTGAAGATGGCTGCCCCAACAATGAGCTGGAGAACCCCCC |
| | CTATGTGCCTGGGGTGGTGGGGGGCACCCTGCAGGCTGCCACCATCTGTGCCAGCAGCCACCAGTTCCTGAGCACCCACTATAACCTGCACAACCTGTATGGCCTGACTGAGGCCATTGCCTCTCACAGGGCCCTGGTGAAGGCTA |
| | GGGGGACTAGGCCCTTTGTGATCAGCAGGTCTACTTTTGCTGGCCATGGCAGGTATGCTGGGCACTGGACTGGGGATGTGTGGTCTAGCTGGGAGCAGCTGGCCAGCTCTGTGCCTGAGATCCTGCAGTTTAATCTGCTGGGGGTG |
| | CCCCTGGTGGGGGCTGATGTGTGTGGCTTCCTGGGCAATACCTCTGAGGAGCTGTGTGTGAGGTGGACTCAGCTGGGGGCTTTCTACCCCTTCATGAGAAACCACAACTCTCTGCTGAGCCTGCCCCAGGAGCCCTATTCTTTTTC |
| | TGAGCCTGCCCAGCAGGCTATGAGGAAGGCCCTGACTCTGAGGTATGCCCTGCTGCCCCACCTGTATACCCTGTTCCATCAGGCCCATGTGGCTGGGGAGACTGTGGCCAGACCTCTGTTCCTGGAGTTCCCCAAGGATAGCTCTA |
| | CTTGGACTGTGGACCACCAGCTGCTGTGGGGGGAGGCTCTGCTGATCACCCCTGTGCTGCAGGCTGGGAAGGCTGAGGTGACTGGCTATTTCCCCCTGGGCACCTGGTATGATCTGCAGACTGTGCCCATTGAGGCCCTGGGCTCT |
| | CTGCCCCCTCCCCCTGCTGCCCCCAGGGAGCCTGCCATCCACTCTGAGGGCCAGTGGGTGACCCTGCCTGCCCCTCTGGACACTATCAATGTGCACCTGAGGGCTGGCTACATCATCCCCCTGCAGGGCCCTGGCCTGACTACCAC |
| | TGAGTCTAGGCAGCAGCCCATGGCCCTGGCTGTGGCTCTGACCAAGGGGGGGGAGGCCAGGGGGGAGCTGTTCTGGGATGATGGGGAGTCTCTGGAGGTGCTGGAGAGGGGGGCCTACACCCAGGTGATCTTCCTGGCTAGGAATA |
| | ACACCATTGTCAATGAGCTGGTGAGGGTGACCTCTGAGGGGGCTGGCCTGCAGCTGCAGAAGGTGACTGTGCTGGGGGTGGCTACTGCCCCCCAGCAGGTGCTGAGCAATGGGGTGCCTGTGAGCAACTTCACCTATAGCCCTGAC |
| | ACCAAGGTGCTGGACATCTGTGTGAGCCTGCTGATGGGGGAGCAGTTCCTGGTGAGCTGGTGCTAATTTAAATCTCGAGCCGGGCGGAGTGTGTTAGTCTCTCCAGAGGGAGGCTGGTTCCCCAGGGAAGCAGAGCCTGTGTGCGG |
| | GCAGCAGCTGTGTGCGGGCCTGGGGGTTGTTAAGTGCAATTATTTTTAATAAAAGGGGCATTTGGAAAAAAAAAAAAAAGGTAGCAGTCGACAGATGAATTCTGCAGATCTGTGGCTTCTAGCTGCCCGGGTGGCATCCCTGTGAC |
| | CCCTCCCCAGTGCCTCTCCTGGCCCTGGAAGTTGCCACTCCAGTGCCCACCAGCCTTGTCCTAATAAAATTAAGTTGCATCATTTTGTCTGACTAGGTGTCCTTCTATAATATTATGGGGTGGAGGGGGGTGGTATGGAGCAAGGG |
| | GCAAGTTGGGAAGACAACCTGTAGGGCCTGCGGGGTCTATTGGGAACCAAGCTGGAGTGCAGTGGCACAATCTTGGCTCACTGCAATCTCCGCCTCCTGGGTTCAAGCGATTCTCCTGCCTCAGCCTCCCGAGTTGTTGGGATTCC |
| | AGGCATGCATGACCAGGCTCAGCTAATTTTTGTTTTTTTGGTAGAGACGGGGTTTCACCATATTGGCCAGGCTGGTCTCCAACTCCTAATCTCAGGTGATCTACCCACCTTGGCCTCCCAAATTGCTGGGATTACAGGCGTGAACC |
| | ACTGCTCCCTTCCCTGTCCTTCTGATTTTAAAAAAAAGAGAAATGTTCTGGCACCTGCACTTGCACTGGGGACAGCCTATTTTGCTAGTTTGTTTTGTTTCGTTTTGTTTTGATGGAGAGCGTATGTTGTTTAAACGCGGCCGCGT |
| | AGATAAGTAGCATGGCGGGTTAATCATTAACTACAAGGAACCCCTAGTGATGGAGTTGGCCACTCCCTCTCTGCGCGCTCGCTCGCTCACTGAGGCCGGGCGACCAAAGGTCGCCCGACGCCCGGGCTTTGCCCGGGCGGCCTCAG |
| | TGAGCGAGCGAGCGCGCAG |
| 32 | > ITR-to-ITR construct with coGAA GAA nucleic acid w/wtIL signal peptide |
| | CTGCGCGCTCGCTCGCTCACTGAGGCCGCCCGGGCAAAGCCCGGGCGTCGGGCGACCTTTGGTCGCCCGGCCTCAGTGAGCGAGCGAGCGCGCAGAGAGGGAGTGGCCAACTCCATCACTAGGGGTTCCTTGTAGTTAATGATTAA |
| | CCCGCCATGCTACTTATCTACGGCGCGCCACGCGTTCTAGGAGTTAATTTTTAAAAAGCAGTCAAAAGTCCAAGTGCCCTTGCGAGCATTTACTCTCTCTGTTTGCTCTGGTTAATAATCTCAGGAGCACAAACATTCCTTACTAG |
| | TTCTAGGAGTTAATTTTTAAAAAGCAGTCAAAAGTCCAAGTGCCCTTGCGAGCATTTACTCTCTCTGTTTGCTCTGGTTAATAATCTCAGGAGCACAAACATTCCTTACTAGTTCTAGAGCGGCCGCCAGTGTGCTGGAATTCGGC |
| | TTTTTTAGGGCTGGAAGCTACCTTTGACATCATTTCCTCTGCGAATGCATGTATAATTTCTACAGAACCTATTAGAAAGGATCACCCAGCCTCTGCTTTTGTACAACTTTCCCTTAAAAAACTGCCAATCCCACTGCTGTTTGGCC |
| | CAATAGTGAGAACTTTTTCCTGCTGCCTCTTGGTGCTTTTGCCTATGGCCCCTATTCTGCCTGCTGAAGACACTCTTGCCAGCATGGACTTAAACCCCTCCAGCTCTGACAATCCTCTTTCTCTTTTGTTTTACATGAAGGGTCTG |
| | GCAGCCAAAGCAATCACTCAAAGTTCAAACCTTATCATTTTTTGCTTTGTTCCTCTTGGCCTTGGTTTTGTACATCAGCTTTGAAAATACCATCCCAGGGTTAATGCTGGGGTTAATTTATAACTGAGAGTGCTCTAGTTCTGCAA |
| | TACAGGACATGCTATAAAAATGGAAAGATGTTGCTTTCTGAGAGATCAGGTGGATTCTTGGGCATTTGCTTAAGCTTGGTACCGCCACCATGTACAGAATGCAGCTGCTGTCCTGCATTGCACTGTCACTGGCACTGGTTACCAAC |
| | TCACAGCAGGGGGCCAGCAGGCCAGGCCCCAGGGATGCCCAGGCCCACCCTGGCAGACCCAGGGCTGTGCCCACCCAGTGTGATGTGCCTCCCAACAGCAGATTTGACTGTGCCCCTGATAAGGCCATTACTCAGGAACAGTGTGA |
| | GGCCAGGGGCTGCTGCTATATCCCTGCCAAGCAGGGCCTGCAGGGGGCCCAGATGGGGCAGCCCTGGTGCTTCTTCCCCCCCAGCTACCCCTCTTATAAGCTGGAGAATCTGAGCAGCTCTGAAATGGGCTACACTGCCACTCTGA |
| | CCAGGACTACCCCCACCTTCTTCCCCAAGGATATTCTGACTCTGAGGCTGGATGTGATGATGGAGACTGAGAACAGGCTGCACTTCACCATCAAGGACCCTGCCAACAGGAGGTATGAGGTGCCCCTGGAAACTCCCAGGGTGCAC |
| | TCTAGGGCCCCCAGCCCCCTGTATTCTGTGGAGTTCTCTGAGGAGCCTTTTGGGGTCATTGTCCACAGGCAGCTGGATGGCAGGGTGCTGCTGAATACTACTGTGGCCCCTCTGTTCTTTGCTGACCAGTTCCTGCAGCTGAGCAC |
| | CAGCCTGCCTTCTCAGTACATTACTGGCCTGGCTGAGCATCTGAGCCCCCTGATGCTGAGCACCTCTTGGACCAGAATCACCCTGTGGAACAGGGACCTGGCTCCCACTCCTGGGGCCAACCTGTATGGCAGCCACCCCTTCTACC |
| | TGGCCCTGGAGGATGGGGGCTCTGCCCATGGGGTGTTCCTGCTGAACAGCAATGCCATGGATGTGGTGCTGCAGCCCTCTCCTGCCCTGTCTTGGAGATCTACTGGGGGCATCCTGGATGTGTATATCTTCCTGGGGCCTGAGCCC |
| | AAGTCTGTGGTGCAGCAGTACCTGGATGTGGTGGGCTACCCCTTCATGCCCCCCTACTGGGGCCTGGGCTTCCACCTGTGCAGGTGGGGCTACTCTTCTACTGCTATCACCAGGCAGGTGGTGGAGAACATGACCAGGGCTCACTT |
| | CCCTCTGGATGTGCAGTGGAATGACCTGGACTACATGGACTCTAGGAGAGACTTCACTTTTAATAAGGATGGGTTCAGGGACTTTCCTGCCATGGTGCAGGAGCTGCATCAGGGGGGCAGGAGATATATGATGATTGTGGACCCTG |
| | CTATTTCTAGCTCTGGCCCTGCTGGCAGCTATAGGCCCTATGATGAGGGGCTGAGGAGGGGGGTGTTCATCACTAATGAGACTGGCCAGCCCCTGATTGGCAAGGTGTGGCCTGGCTCTACTGCCTTCCCTGATTTCACCAACCCC |
| | ACTGCCCTGGCCTGGTGGGAGGATATGGTGGCTGAGTTTCATGACCAGGTGCCCTTTGATGGCATGTGGATTGACATGAATGAGCCCAGCAACTTTATCAGGGGCTCTGAAGATGGCTGCCCCAACAATGAGCTGGAGAACCCCCC |
| | CTATGTGCCTGGGGTGGTGGGGGGCACCCTGCAGGCTGCCACCATCTGTGCCAGCAGCCACCAGTTCCTGAGCACCCACTATAACCTGCACAACCTGTATGGCCTGACTGAGGCCATTGCCTCTCACAGGGCCCTGGTGAAGGCTA |
| | GGGGGACTAGGCCCTTTGTGATCAGCAGGTCTACTTTTGCTGGCCATGGCAGGTATGCTGGGCACTGGACTGGGGATGTGTGGTCTAGCTGGGAGCAGCTGGCCAGCTCTGTGCCTGAGATCCTGCAGTTTAATCTGCTGGGGGTG |
| | CCCCTGGTGGGGGCTGATGTGTGTGGCTTCCTGGGCAATACCTCTGAGGAGCTGTGTGTGAGGTGGACTCAGCTGGGGGCTTTCTACCCCTTCATGAGAAACCACAACTCTCTGCTGAGCCTGCCCCAGGAGCCCTATTCTTTTTC |
| | TGAGCCTGCCCAGCAGGCTATGAGGAAGGCCCTGACTCTGAGGTATGCCCTGCTGCCCCACCTGTATACCCTGTTCCATCAGGCCCATGTGGCTGGGGAGACTGTGGCCAGACCTCTGTTCCTGGAGTTCCCCAAGGATAGCTCTA |
| | CTTGGACTGTGGACCACCAGCTGCTGTGGGGGGAGGCTCTGCTGATCACCCCTGTGCTGCAGGCTGGGAAGGCTGAGGTGACTGGCTATTTCCCCCTGGGCACCTGGTATGATCTGCAGACTGTGCCCATTGAGGCCCTGGGCTCT |
| | CTGCCCCCTCCCCCTGCTGCCCCCAGGGAGCCTGCCATCCACTCTGAGGGCCAGTGGGTGACCCTGCCTGCCCCTCTGGACACTATCAATGTGCACCTGAGGGCTGGCTACATCATCCCCCTGCAGGGCCCTGGCCTGACTACCAC |
| | TGAGTCTAGGCAGCAGCCCATGGCCCTGGCTGTGGCTCTGACCAAGGGGGGGGAGGCCAGGGGGGAGCTGTTCTGGGATGATGGGGAGTCTCTGGAGGTGCTGGAGAGGGGGGCCTACACCCAGGTGATCTTCCTGGCTAGGAATA |
| | ACACCATTGTCAATGAGCTGGTGAGGGTGACCTCTGAGGGGGCTGGCCTGCAGCTGCAGAAGGTGACTGTGCTGGGGGTGGCTACTGCCCCCCAGCAGGTGCTGAGCAATGGGGTGCCTGTGAGCAACTTCACCTATAGCCCTGAC |
| | ACCAAGGTGCTGGACATCTGTGTGAGCCTGCTGATGGGGGAGCAGTTCCTGGTGAGCTGGTGCTAATTTAAATCTCGAGCCGGGCGGAGTGTGTTAGTCTCTCCAGAGGGAGGCTGGTTCCCCAGGGAAGCAGAGCCTGTGTGCGG |
| | GCAGCAGCTGTGTGCGGGCCTGGGGGTTGTTAAGTGCAATTATTTTTAATAAAAGGGGCATTTGGAAAAAAAAAAAAAAGGTAGCAGTCGACAGATGAATTCTGCAGATCTGTGGCTTCTAGCTGCCCGGGTGGCATCCCTGTGAC |
| | CCCTCCCCAGTGCCTCTCCTGGCCCTGGAAGTTGCCACTCCAGTGCCCACCAGCCTTGTCCTAATAAAATTAAGTTGCATCATTTTGTCTGACTAGGTGTCCTTCTATAATATTATGGGGTGGAGGGGGGTGGTATGGAGCAAGGG |
| | GCAAGTTGGGAAGACAACCTGTAGGGCCTGCGGGGTCTATTGGGAACCAAGCTGGAGTGCAGTGGCACAATCTTGGCTCACTGCAATCTCCGCCTCCTGGGTTCAAGCGATTCTCCTGCCTCAGCCTCCCGAGTTGTTGGGATTCC |
| | AGGCATGCATGACCAGGCTCAGCTAATTTTTGTTTTTTTGGTAGAGACGGGGTTTCACCATATTGGCCAGGCTGGTCTCCAACTCCTAATCTCAGGTGATCTACCCACCTTGGCCTCCCAAATTGCTGGGATTACAGGCGTGAACC |
| | ACTGCTCCCTTCCCTGTCCTTCTGATTTTAAAAAAAAGAGAAATGTTCTGGCACCTGCACTTGCACTGGGGACAGCCTATTTTGCTAGTTTGTTTTGTTTCGTTTTGTTTTGATGGAGAGCGTATGTTGTTTAAACGCGGCCGCGT |
| | AGATAAGTAGCATGGCGGGTTAATCATTAACTACAAGGAACCCCTAGTGATGGAGTTGGCCACTCCCTCTCTGCGCGCTCGCTCGCTCACTGAGGCCGGGCGACCAAAGGTCGCCCGACGCCCGGGCTTTGCCCGGGCGGCCTCAG |
| | TGAGCGAGCGAGCGCGCAG |
| 33 | > ITR-to-ITR construct with coGAA GAA nucleic acid w/ILmut signal peptide |
| | CTGCGCGCTCGCTCGCTCACTGAGGCCGCCCGGGCAAAGCCCGGGCGTCGGGCGACCTTTGGTCGCCCGGCCTCAGTGAGCGAGCGAGCGCGCAGAGAGGGAGTGGCCAACTCCATCACTAGGGGTTCCTTGTAGTTAATGATTAA |
| | CCCGCCATGCTACTTATCTACGGCGCGCCACGCGTTCTAGGAGTTAATTTTTAAAAAGCAGTCAAAAGTCCAAGTGCCCTTGCGAGCATTTACTCTCTCTGTTTGCTCTGGTTAATAATCTCAGGAGCACAAACATTCCTTACTAG |
| | TTCTAGGAGTTAATTTTTAAAAAGCAGTCAAAAGTCCAAGTGCCCTTGCGAGCATTTACTCTCTCTGTTTGCTCTGGTTAATAATCTCAGGAGCACAAACATTCCTTACTAGTTCTAGAGCGGCCGCCAGTGTGCTGGAATTCGGC |
| | TTTTTTAGGGCTGGAAGCTACCTTTGACATCATTTCCTCTGCGAATGCATGTATAATTTCTACAGAACCTATTAGAAAGGATCACCCAGCCTCTGCTTTTGTACAACTTTCCCTTAAAAAACTGCCAATCCCACTGCTGTTTGGCC |
| | CAATAGTGAGAACTTTTTCCTGCTGCCTCTTGGTGCTTTTGCCTATGGCCCCTATTCTGCCTGCTGAAGACACTCTTGCCAGCATGGACTTAAACCCCTCCAGCTCTGACAATCCTCTTTCTCTTTTGTTTTACATGAAGGGTCTG |
| | GCAGCCAAAGCAATCACTCAAAGTTCAAACCTTATCATTTTTTGCTTTGTTCCTCTTGGCCTTGGTTTTGTACATCAGCTTTGAAAATACCATCCCAGGGTTAATGCTGGGGTTAATTTATAACTGAGAGTGCTCTAGTTCTGCAA |
| | TACAGGACATGCTATAAAAATGGAAAGATGTTGCTTTCTGAGAGATCAGGTGGATTCTTGGGCATTTGCTTAAGCTTGGTACCGCCACCATGTACAGAATGCAGCTGCTGCTGCTGATTGCACTGTCACTGGCACTGGTTACCAAC |
| | TCACAGCAGGGGGCCAGCAGGCCAGGCCCCAGGGATGCCCAGGCCCACCCTGGCAGACCCAGGGCTGTGCCCACCCAGTGTGATGTGCCTCCCAACAGCAGATTTGACTGTGCCCCTGATAAGGCCATTACTCAGGAACAGTGTGA |
| | GGCCAGGGGCTGCTGCTATATCCCTGCCAAGCAGGGCCTGCAGGGGGCCCAGATGGGGCAGCCCTGGTGCTTCTTCCCCCCCAGCTACCCCTCTTATAAGCTGGAGAATCTGAGCAGCTCTGAAATGGGCTACACTGCCACTCTGA |
| | CCAGGACTACCCCCACCTTCTTCCCCAAGGATATTCTGACTCTGAGGCTGGATGTGATGATGGAGACTGAGAACAGGCTGCACTTCACCATCAAGGACCCTGCCAACAGGAGGTATGAGGTGCCCCTGGAAACTCCCAGGGTGCAC |
| | TCTAGGGCCCCCAGCCCCCTGTATTCTGTGGAGTTCTCTGAGGAGCCTTTTGGGGTCATTGTCCACAGGCAGCTGGATGGCAGGGTGCTGCTGAATACTACTGTGGCCCCTCTGTTCTTTGCTGACCAGTTCCTGCAGCTGAGCAC |
| | CAGCCTGCCTTCTCAGTACATTACTGGCCTGGCTGAGCATCTGAGCCCCCTGATGCTGAGCACCTCTTGGACCAGAATCACCCTGTGGAACAGGGACCTGGCTCCCACTCCTGGGGCCAACCTGTATGGCAGCCACCCCTTCTACC |
| | TGGCCCTGGAGGATGGGGGCTCTGCCCATGGGGTGTTCCTGCTGAACAGCAATGCCATGGATGTGGTGCTGCAGCCCTCTCCTGCCCTGTCTTGGAGATCTACTGGGGGCATCCTGGATGTGTATATCTTCCTGGGGCCTGAGCCC |
| | AAGTCTGTGGTGCAGCAGTACCTGGATGTGGTGGGCTACCCCTTCATGCCCCCCTACTGGGGCCTGGGCTTCCACCTGTGCAGGTGGGGCTACTCTTCTACTGCTATCACCAGGCAGGTGGTGGAGAACATGACCAGGGCTCACTT |
| | CCCTCTGGATGTGCAGTGGAATGACCTGGACTACATGGACTCTAGGAGAGACTTCACTTTTAATAAGGATGGGTTCAGGGACTTTCCTGCCATGGTGCAGGAGCTGCATCAGGGGGGCAGGAGATATATGATGATTGTGGACCCTG |
| | CTATTTCTAGCTCTGGCCCTGCTGGCAGCTATAGGCCCTATGATGAGGGGCTGAGGAGGGGGGTGTTCATCACTAATGAGACTGGCCAGCCCCTGATTGGCAAGGTGTGGCCTGGCTCTACTGCCTTCCCTGATTTCACCAACCCC |
| | ACTGCCCTGGCCTGGTGGGAGGATATGGTGGCTGAGTTTCATGACCAGGTGCCCTTTGATGGCATGTGGATTGACATGAATGAGCCCAGCAACTTTATCAGGGGCTCTGAAGATGGCTGCCCCAACAATGAGCTGGAGAACCCCCC |
| | CTATGTGCCTGGGGTGGTGGGGGGCACCCTGCAGGCTGCCACCATCTGTGCCAGCAGCCACCAGTTCCTGAGCACCCACTATAACCTGCACAACCTGTATGGCCTGACTGAGGCCATTGCCTCTCACAGGGCCCTGGTGAAGGCTA |
| | GGGGGACTAGGCCCTTTGTGATCAGCAGGTCTACTTTTGCTGGCCATGGCAGGTATGCTGGGCACTGGACTGGGGATGTGTGGTCTAGCTGGGAGCAGCTGGCCAGCTCTGTGCCTGAGATCCTGCAGTTTAATCTGCTGGGGGTG |
| | CCCCTGGTGGGGGCTGATGTGTGTGGCTTCCTGGGCAATACCTCTGAGGAGCTGTGTGTGAGGTGGACTCAGCTGGGGGCTTTCTACCCCTTCATGAGAAACCACAACTCTCTGCTGAGCCTGCCCCAGGAGCCCTATTCTTTTTC |
| | TGAGCCTGCCCAGCAGGCTATGAGGAAGGCCCTGACTCTGAGGTATGCCCTGCTGCCCCACCTGTATACCCTGTTCCATCAGGCCCATGTGGCTGGGGAGACTGTGGCCAGACCTCTGTTCCTGGAGTTCCCCAAGGATAGCTCTA |
| | CTTGGACTGTGGACCACCAGCTGCTGTGGGGGGAGGCTCTGCTGATCACCCCTGTGCTGCAGGCTGGGAAGGCTGAGGTGACTGGCTATTTCCCCCTGGGCACCTGGTATGATCTGCAGACTGTGCCCATTGAGGCCCTGGGCTCT |
| | CTGCCCCCTCCCCCTGCTGCCCCCAGGGAGCCTGCCATCCACTCTGAGGGCCAGTGGGTGACCCTGCCTGCCCCTCTGGACACTATCAATGTGCACCTGAGGGCTGGCTACATCATCCCCCTGCAGGGCCCTGGCCTGACTACCAC |
| | TGAGTCTAGGCAGCAGCCCATGGCCCTGGCTGTGGCTCTGACCAAGGGGGGGGAGGCCAGGGGGGAGCTGTTCTGGGATGATGGGGAGTCTCTGGAGGTGCTGGAGAGGGGGGCCTACACCCAGGTGATCTTCCTGGCTAGGAATA |
| | ACACCATTGTCAATGAGCTGGTGAGGGTGACCTCTGAGGGGGCTGGCCTGCAGCTGCAGAAGGTGACTGTGCTGGGGGTGGCTACTGCCCCCCAGCAGGTGCTGAGCAATGGGGTGCCTGTGAGCAACTTCACCTATAGCCCTGAC |
| | ACCAAGGTGCTGGACATCTGTGTGAGCCTGCTGATGGGGGAGCAGTTCCTGGTGAGCTGGTGCTAATTTAAATCTCGAGCCGGGCGGAGTGTGTTAGTCTCTCCAGAGGGAGGCTGGTTCCCCAGGGAAGCAGAGCCTGTGTGCGG |
| | GCAGCAGCTGTGTGCGGGCCTGGGGGTTGTTAAGTGCAATTATTTTTAATAAAAGGGGCATTTGGAAAAAAAAAAAAAAGGTAGCAGTCGACAGATGAATTCTGCAGATCTGTGGCTTCTAGCTGCCCGGGTGGCATCCCTGTGAC |
| | CCCTCCCCAGTGCCTCTCCTGGCCCTGGAAGTTGCCACTCCAGTGCCCACCAGCCTTGTCCTAATAAAATTAAGTTGCATCATTTTGTCTGACTAGGTGTCCTTCTATAATATTATGGGGTGGAGGGGGGTGGTATGGAGCAAGGG |
| | GCAAGTTGGGAAGACAACCTGTAGGGCCTGCGGGGTCTATTGGGAACCAAGCTGGAGTGCAGTGGCACAATCTTGGCTCACTGCAATCTCCGCCTCCTGGGTTCAAGCGATTCTCCTGCCTCAGCCTCCCGAGTTGTTGGGATTCC |
| | AGGCATGCATGACCAGGCTCAGCTAATTTTTGTTTTTTTGGTAGAGACGGGGTTTCACCATATTGGCCAGGCTGGTCTCCAACTCCTAATCTCAGGTGATCTACCCACCTTGGCCTCCCAAATTGCTGGGATTACAGGCGTGAACC |
| | ACTGCTCCCTTCCCTGTCCTTCTGATTTTAAAAAAAAGAGAAATGTTCTGGCACCTGCACTTGCACTGGGGACAGCCTATTTTGCTAGTTTGTTTTGTTTCGTTTTGTTTTGATGGAGAGCGTATGTTGTTTAAACGCGGCCGCGT |
| | AGATAAGTAGCATGGCGGGTTAATCATTAACTACAAGGAACCCCTAGTGATGGAGTTGGCCACTCCCTCTCTGCGCGCTCGCTCGCTCACTGAGGCCGGGCGACCAAAGGTCGCCCGACGCCCGGGCTTTGCCCGGGCGGCCTCAG |
| | TGAGCGAGCGAGCGCGCAG |
| 34 | > ITR-to-ITR construct with coGAA GAA nucleic acid w/A2 signal peptide |
| | CTGCGCGCTCGCTCGCTCACTGAGGCCGCCCGGGCAAAGCCCGGGCGTCGGGCGACCTTTGGTCGCCCGGCCTCAGTGAGCGAGCGAGCGCGCAGAGAGGGAGTGGCCAACTCCATCACTAGGGGTTCCTTGTAGTTAATGATTAA |
| | CCCGCCATGCTACTTATCTACGGCGCGCCACGCGTTCTAGGAGTTAATTTTTAAAAAGCAGTCAAAAGTCCAAGTGCCCTTGCGAGCATTTACTCTCTCTGTTTGCTCTGGTTAATAATCTCAGGAGCACAAACATTCCTTACTAG |
| | TTCTAGGAGTTAATTTTTAAAAAGCAGTCAAAAGTCCAAGTGCCCTTGCGAGCATTTACTCTCTCTGTTTGCTCTGGTTAATAATCTCAGGAGCACAAACATTCCTTACTAGTTCTAGAGCGGCCGCCAGTGTGCTGGAATTCGGC |
| | TTTTTTAGGGCTGGAAGCTACCTTTGACATCATTTCCTCTGCGAATGCATGTATAATTTCTACAGAACCTATTAGAAAGGATCACCCAGCCTCTGCTTTTGTACAACTTTCCCTTAAAAAACTGCCAATCCCACTGCTGTTTGGCC |
| | CAATAGTGAGAACTTTTTCCTGCTGCCTCTTGGTGCTTTTGCCTATGGCCCCTATTCTGCCTGCTGAAGACACTCTTGCCAGCATGGACTTAAACCCCTCCAGCTCTGACAATCCTCTTTCTCTTTTGTTTTACATGAAGGGTCTG |
| | GCAGCCAAAGCAATCACTCAAAGTTCAAACCTTATCATTTTTTGCTTTGTTCCTCTTGGCCTTGGTTTTGTACATCAGCTTTGAAAATACCATCCCAGGGTTAATGCTGGGGTTAATTTATAACTGAGAGTGCTCTAGTTCTGCAA |
| | TACAGGACATGCTATAAAAATGGAAAGATGTTGCTTTCTGAGAGATCAGGTGGATTCTTGGGCATTTGCTTAAGCTTGGTACCGCCACCATGGGGAAGAACAAACTCCTTCATCCAAGTCTGGTTCTTCTCCTCTTGGTCCTCCTG |
| | CCCACAGATGCCCAGCAGGGGGCCAGCAGGCCAGGCCCCAGGGATGCCCAGGCCCACCCTGGCAGACCCAGGGCTGTGCCCACCCAGTGTGATGTGCCTCCCAACAGCAGATTTGACTGTGCCCCTGATAAGGCCATTACTCAGGA |
| | ACAGTGTGAGGCCAGGGGCTGCTGCTATATCCCTGCCAAGCAGGGCCTGCAGGGGGCCCAGATGGGGCAGCCCTGGTGCTTCTTCCCCCCCAGCTACCCCTCTTATAAGCTGGAGAATCTGAGCAGCTCTGAAATGGGCTACACTG |
| | CCACTCTGACCAGGACTACCCCCACCTTCTTCCCCAAGGATATTCTGACTCTGAGGCTGGATGTGATGATGGAGACTGAGAACAGGCTGCACTTCACCATCAAGGACCCTGCCAACAGGAGGTATGAGGTGCCCCTGGAAACTCCC |
| | AGGGTGCACTCTAGGGCCCCCAGCCCCCTGTATTCTGTGGAGTTCTCTGAGGAGCCTTTTGGGGTCATTGTCCACAGGCAGCTGGATGGCAGGGTGCTGCTGAATACTACTGTGGCCCCTCTGTTCTTTGCTGACCAGTTCCTGCA |
| | GCTGAGCACCAGCCTGCCTTCTCAGTACATTACTGGCCTGGCTGAGCATCTGAGCCCCCTGATGCTGAGCACCTCTTGGACCAGAATCACCCTGTGGAACAGGGACCTGGCTCCCACTCCTGGGGCCAACCTGTATGGCAGCCACC |
| | CCTTCTACCTGGCCCTGGAGGATGGGGGCTCTGCCCATGGGGTGTTCCTGCTGAACAGCAATGCCATGGATGTGGTGCTGCAGCCCTCTCCTGCCCTGTCTTGGAGATCTACTGGGGGCATCCTGGATGTGTATATCTTCCTGGGG |
| | CCTGAGCCCAAGTCTGTGGTGCAGCAGTACCTGGATGTGGTGGGCTACCCCTTCATGCCCCCCTACTGGGGCCTGGGCTTCCACCTGTGCAGGTGGGGCTACTCTTCTACTGCTATCACCAGGCAGGTGGTGGAGAACATGACCAG |
| | GGCTCACTTCCCTCTGGATGTGCAGTGGAATGACCTGGACTACATGGACTCTAGGAGAGACTTCACTTTTAATAAGGATGGGTTCAGGGACTTTCCTGCCATGGTGCAGGAGCTGCATCAGGGGGGCAGGAGATATATGATGATTG |
| | TGGACCCTGCTATTTCTAGCTCTGGCCCTGCTGGCAGCTATAGGCCCTATGATGAGGGGCTGAGGAGGGGGGTGTTCATCACTAATGAGACTGGCCAGCCCCTGATTGGCAAGGTGTGGCCTGGCTCTACTGCCTTCCCTGATTTC |
| | ACCAACCCCACTGCCCTGGCCTGGTGGGAGGATATGGTGGCTGAGTTTCATGACCAGGTGCCCTTTGATGGCATGTGGATTGACATGAATGAGCCCAGCAACTTTATCAGGGGCTCTGAAGATGGCTGCCCCAACAATGAGCTGGA |
| | GAACCCCCCCTATGTGCCTGGGGTGGTGGGGGGCACCCTGCAGGCTGCCACCATCTGTGCCAGCAGCCACCAGTTCCTGAGCACCCACTATAACCTGCACAACCTGTATGGCCTGACTGAGGCCATTGCCTCTCACAGGGCCCTGG |
| | TGAAGGCTAGGGGGACTAGGCCCTTTGTGATCAGCAGGTCTACTTTTGCTGGCCATGGCAGGTATGCTGGGCACTGGACTGGGGATGTGTGGTCTAGCTGGGAGCAGCTGGCCAGCTCTGTGCCTGAGATCCTGCAGTTTAATCTG |
| | CTGGGGGTGCCCCTGGTGGGGGCTGATGTGTGTGGCTTCCTGGGCAATACCTCTGAGGAGCTGTGTGTGAGGTGGACTCAGCTGGGGGCTTTCTACCCCTTCATGAGAAACCACAACTCTCTGCTGAGCCTGCCCCAGGAGCCCTA |
| | TTCTTTTTCTGAGCCTGCCCAGCAGGCTATGAGGAAGGCCCTGACTCTGAGGTATGCCCTGCTGCCCCACCTGTATACCCTGTTCCATCAGGCCCATGTGGCTGGGGAGACTGTGGCCAGACCTCTGTTCCTGGAGTTCCCCAAGG |
| | ATAGCTCTACTTGGACTGTGGACCACCAGCTGCTGTGGGGGGAGGCTCTGCTGATCACCCCTGTGCTGCAGGCTGGGAAGGCTGAGGTGACTGGCTATTTCCCCCTGGGCACCTGGTATGATCTGCAGACTGTGCCCATTGAGGCC |
| | CTGGGCTCTCTGCCCCCTCCCCCTGCTGCCCCCAGGGAGCCTGCCATCCACTCTGAGGGCCAGTGGGTGACCCTGCCTGCCCCTCTGGACACTATCAATGTGCACCTGAGGGCTGGCTACATCATCCCCCTGCAGGGCCCTGGCCT |
| | GACTACCACTGAGTCTAGGCAGCAGCCCATGGCCCTGGCTGTGGCTCTGACCAAGGGGGGGGAGGCCAGGGGGGAGCTGTTCTGGGATGATGGGGAGTCTCTGGAGGTGCTGGAGAGGGGGGCCTACACCCAGGTGATCTTCCTGG |
| | CTAGGAATAACACCATTGTCAATGAGCTGGTGAGGGTGACCTCTGAGGGGGCTGGCCTGCAGCTGCAGAAGGTGACTGTGCTGGGGGTGGCTACTGCCCCCCAGCAGGTGCTGAGCAATGGGGTGCCTGTGAGCAACTTCACCTAT |
| | AGCCCTGACACCAAGGTGCTGGACATCTGTGTGAGCCTGCTGATGGGGGAGCAGTTCCTGGTGAGCTGGTGCTAATTTAAATCTCGAGCCGGGCGGAGTGTGTTAGTCTCTCCAGAGGGAGGCTGGTTCCCCAGGGAAGCAGAGCC |
| | TGTGTGCGGGCAGCAGCTGTGTGCGGGCCTGGGGGTTGTTAAGTGCAATTATTTTTAATAAAAGGGGCATTTGGAAAAAAAAAAAAAAGGTAGCAGTCGACAGATGAATTCTGCAGATCTGTGGCTTCTAGCTGCCCGGGTGGCAT |
| | CCCTGTGACCCCTCCCCAGTGCCTCTCCTGGCCCTGGAAGTTGCCACTCCAGTGCCCACCAGCCTTGTCCTAATAAAATTAAGTTGCATCATTTTGTCTGACTAGGTGTCCTTCTATAATATTATGGGGTGGAGGGGGGTGGTATG |
| | GAGCAAGGGGCAAGTTGGGAAGACAACCTGTAGGGCCTGCGGGGTCTATTGGGAACCAAGCTGGAGTGCAGTGGCACAATCTTGGCTCACTGCAATCTCCGCCTCCTGGGTTCAAGCGATTCTCCTGCCTCAGCCTCCCGAGTTGT |
| | TGGGATTCCAGGCATGCATGACCAGGCTCAGCTAATTTTTGTTTTTTTGGTAGAGACGGGGTTTCACCATATTGGCCAGGCTGGTCTCCAACTCCTAATCTCAGGTGATCTACCCACCTTGGCCTCCCAAATTGCTGGGATTACAG |
| | GCGTGAACCACTGCTCCCTTCCCTGTCCTTCTGATTTTAAAAAAAAGAGAAATGTTCTGGCACCTGCACTTGCACTGGGGACAGCCTATTTTGCTAGTTTGTTTTGTTTCGTTTTGTTTTGATGGAGAGCGTATGTTGTTTAAACG |
| | CGGCCGCGTAGATAAGTAGCATGGCGGGTTAATCATTAACTACAAGGAACCCCTAGTGATGGAGTTGGCCACTCCCTCTCTGCGCGCTCGCTCGCTCACTGAGGCCGGGCGACCAAAGGTCGCCCGACGCCCGGGCTTTGCCCGGG |
| | CGGCCTCAGTGAGCGAGCGAGCGCGCAG |
| 35 | > ITR-to-ITR construct with coGAA GAA nucleic acid w/PXP signal peptide |
| | CTGCGCGCTCGCTCGCTCACTGAGGCCGCCCGGGCAAAGCCCGGGCGTCGGGCGACCTTTGGTCGCCCGGCCTCAGTGAGCGAGCGAGCGCGCAGAGAGGGAGTGGCCAACTCCATCACTAGGGGTTCCTTGTAGTTAATGATTAA |
| | CCCGCCATGCTACTTATCTACGGCGCGCCACGCGTTCTAGGAGTTAATTTTTAAAAAGCAGTCAAAAGTCCAAGTGCCCTTGCGAGCATTTACTCTCTCTGTTTGCTCTGGTTAATAATCTCAGGAGCACAAACATTCCTTACTAG |
| | TTCTAGGAGTTAATTTTTAAAAAGCAGTCAAAAGTCCAAGTGCCCTTGCGAGCATTTACTCTCTCTGTTTGCTCTGGTTAATAATCTCAGGAGCACAAACATTCCTTACTAGTTCTAGAGCGGCCGCCAGTGTGCTGGAATTCGGC |
| | TTTTTTAGGGCTGGAAGCTACCTTTGACATCATTTCCTCTGCGAATGCATGTATAATTTCTACAGAACCTATTAGAAAGGATCACCCAGCCTCTGCTTTTGTACAACTTTCCCTTAAAAAACTGCCAATCCCACTGCTGTTTGGCC |
| | CAATAGTGAGAACTTTTTCCTGCTGCCTCTTGGTGCTTTTGCCTATGGCCCCTATTCTGCCTGCTGAAGACACTCTTGCCAGCATGGACTTAAACCCCTCCAGCTCTGACAATCCTCTTTCTCTTTTGTTTTACATGAAGGGTCTG |
| | GCAGCCAAAGCAATCACTCAAAGTTCAAACCTTATCATTTTTTGCTTTGTTCCTCTTGGCCTTGGTTTTGTACATCAGCTTTGAAAATACCATCCCAGGGTTAATGCTGGGGTTAATTTATAACTGAGAGTGCTCTAGTTCTGCAA |
| | TACAGGACATGCTATAAAAATGGAAAGATGTTGCTTTCTGAGAGATCAGGTGGATTCTTGGGCATTTGCTTAAGCTTGGTACCGCCACCATGAGAAAAGACAGACTTCTTCATTTATGTCTTGTGCTACTTCTTATCCTGCTTTCT |
| | GCCAGTGACTCAAACTCTCAGCAGGGGGCCAGCAGGCCAGGCCCCAGGGATGCCCAGGCCCACCCTGGCAGACCCAGGGCTGTGCCCACCCAGTGTGATGTGCCTCCCAACAGCAGATTTGACTGTGCCCCTGATAAGGCCATTAC |
| | TCAGGAACAGTGTGAGGCCAGGGGCTGCTGCTATATCCCTGCCAAGCAGGGCCTGCAGGGGGCCCAGATGGGGCAGCCCTGGTGCTTCTTCCCCCCCAGCTACCCCTCTTATAAGCTGGAGAATCTGAGCAGCTCTGAAATGGGCT |
| | ACACTGCCACTCTGACCAGGACTACCCCCACCTTCTTCCCCAAGGATATTCTGACTCTGAGGCTGGATGTGATGATGGAGACTGAGAACAGGCTGCACTTCACCATCAAGGACCCTGCCAACAGGAGGTATGAGGTGCCCCTGGAA |
| | ACTCCCAGGGTGCACTCTAGGGCCCCCAGCCCCCTGTATTCTGTGGAGTTCTCTGAGGAGCCTTTTGGGGTCATTGTCCACAGGCAGCTGGATGGCAGGGTGCTGCTGAATACTACTGTGGCCCCTCTGTTCTTTGCTGACCAGTT |
| | CCTGCAGCTGAGCACCAGCCTGCCTTCTCAGTACATTACTGGCCTGGCTGAGCATCTGAGCCCCCTGATGCTGAGCACCTCTTGGACCAGAATCACCCTGTGGAACAGGGACCTGGCTCCCACTCCTGGGGCCAACCTGTATGGCA |
| | GCCACCCCTTCTACCTGGCCCTGGAGGATGGGGGCTCTGCCCATGGGGTGTTCCTGCTGAACAGCAATGCCATGGATGTGGTGCTGCAGCCCTCTCCTGCCCTGTCTTGGAGATCTACTGGGGGCATCCTGGATGTGTATATCTTC |
| | CTGGGGCCTGAGCCCAAGTCTGTGGTGCAGCAGTACCTGGATGTGGTGGGCTACCCCTTCATGCCCCCCTACTGGGGCCTGGGCTTCCACCTGTGCAGGTGGGGCTACTCTTCTACTGCTATCACCAGGCAGGTGGTGGAGAACAT |
| | GACCAGGGCTCACTTCCCTCTGGATGTGCAGTGGAATGACCTGGACTACATGGACTCTAGGAGAGACTTCACTTTTAATAAGGATGGGTTCAGGGACTTTCCTGCCATGGTGCAGGAGCTGCATCAGGGGGGCAGGAGATATATGA |
| | TGATTGTGGACCCTGCTATTTCTAGCTCTGGCCCTGCTGGCAGCTATAGGCCCTATGATGAGGGGCTGAGGAGGGGGGTGTTCATCACTAATGAGACTGGCCAGCCCCTGATTGGCAAGGTGTGGCCTGGCTCTACTGCCTTCCCT |
| | GATTTCACCAACCCCACTGCCCTGGCCTGGTGGGAGGATATGGTGGCTGAGTTTCATGACCAGGTGCCCTTTGATGGCATGTGGATTGACATGAATGAGCCCAGCAACTTTATCAGGGGCTCTGAAGATGGCTGCCCCAACAATGA |
| | GCTGGAGAACCCCCCCTATGTGCCTGGGGTGGTGGGGGGCACCCTGCAGGCTGCCACCATCTGTGCCAGCAGCCACCAGTTCCTGAGCACCCACTATAACCTGCACAACCTGTATGGCCTGACTGAGGCCATTGCCTCTCACAGGG |
| | CCCTGGTGAAGGCTAGGGGGACTAGGCCCTTTGTGATCAGCAGGTCTACTTTTGCTGGCCATGGCAGGTATGCTGGGCACTGGACTGGGGATGTGTGGTCTAGCTGGGAGCAGCTGGCCAGCTCTGTGCCTGAGATCCTGCAGTTT |
| | AATCTGCTGGGGGTGCCCCTGGTGGGGGCTGATGTGTGTGGCTTCCTGGGCAATACCTCTGAGGAGCTGTGTGTGAGGTGGACTCAGCTGGGGGCTTTCTACCCCTTCATGAGAAACCACAACTCTCTGCTGAGCCTGCCCCAGGA |
| | GCCCTATTCTTTTTCTGAGCCTGCCCAGCAGGCTATGAGGAAGGCCCTGACTCTGAGGTATGCCCTGCTGCCCCACCTGTATACCCTGTTCCATCAGGCCCATGTGGCTGGGGAGACTGTGGCCAGACCTCTGTTCCTGGAGTTCC |
| | CCAAGGATAGCTCTACTTGGACTGTGGACCACCAGCTGCTGTGGGGGGAGGCTCTGCTGATCACCCCTGTGCTGCAGGCTGGGAAGGCTGAGGTGACTGGCTATTTCCCCCTGGGCACCTGGTATGATCTGCAGACTGTGCCCATT |
| | GAGGCCCTGGGCTCTCTGCCCCCTCCCCCTGCTGCCCCCAGGGAGCCTGCCATCCACTCTGAGGGCCAGTGGGTGACCCTGCCTGCCCCTCTGGACACTATCAATGTGCACCTGAGGGCTGGCTACATCATCCCCCTGCAGGGCCC |
| | TGGCCTGACTACCACTGAGTCTAGGCAGCAGCCCATGGCCCTGGCTGTGGCTCTGACCAAGGGGGGGGAGGCCAGGGGGGAGCTGTTCTGGGATGATGGGGAGTCTCTGGAGGTGCTGGAGAGGGGGGCCTACACCCAGGTGATCT |
| | TCCTGGCTAGGAATAACACCATTGTCAATGAGCTGGTGAGGGTGACCTCTGAGGGGGCTGGCCTGCAGCTGCAGAAGGTGACTGTGCTGGGGGTGGCTACTGCCCCCCAGCAGGTGCTGAGCAATGGGGTGCCTGTGAGCAACTTC |
| | ACCTATAGCCCTGACACCAAGGTGCTGGACATCTGTGTGAGCCTGCTGATGGGGGAGCAGTTCCTGGTGAGCTGGTGCTAATTTAAATCTCGAGCCGGGCGGAGTGTGTTAGTCTCTCCAGAGGGAGGCTGGTTCCCCAGGGAAGC |
| | AGAGCCTGTGTGCGGGCAGCAGCTGTGTGCGGGCCTGGGGGTTGTTAAGTGCAATTATTTTTAATAAAAGGGGCATTTGGAAAAAAAAAAAAAAGGTAGCAGTCGACAGATGAATTCTGCAGATCTGTGGCTTCTAGCTGCCCGGG |
| | TGGCATCCCTGTGACCCCTCCCCAGTGCCTCTCCTGGCCCTGGAAGTTGCCACTCCAGTGCCCACCAGCCTTGTCCTAATAAAATTAAGTTGCATCATTTTGTCTGACTAGGTGTCCTTCTATAATATTATGGGGTGGAGGGGGGT |
| | GGTATGGAGCAAGGGGCAAGTTGGGAAGACAACCTGTAGGGCCTGCGGGGTCTATTGGGAACCAAGCTGGAGTGCAGTGGCACAATCTTGGCTCACTGCAATCTCCGCCTCCTGGGTTCAAGCGATTCTCCTGCCTCAGCCTCCCG |
| | AGTTGTTGGGATTCCAGGCATGCATGACCAGGCTCAGCTAATTTTTGTTTTTTTGGTAGAGACGGGGTTTCACCATATTGGCCAGGCTGGTCTCCAACTCCTAATCTCAGGTGATCTACCCACCTTGGCCTCCCAAATTGCTGGGA |
| | TTACAGGCGTGAACCACTGCTCCCTTCCCTGTCCTTCTGATTTTAAAAAAAAGAGAAATGTTCTGGCACCTGCACTTGCACTGGGGACAGCCTATTTTGCTAGTTTGTTTTGTTTCGTTTTGTTTTGATGGAGAGCGTATGTTGTT |
| | TAAACGCGGCCGCGTAGATAAGTAGCATGGCGGGTTAATCATTAACTACAAGGAACCCCTAGTGATGGAGTTGGCCACTCCCTCTCTGCGCGCTCGCTCGCTCACTGAGGCCGGGCGACCAAAGGTCGCCCGACGCCCGGGCTTTG |
| | CCCGGGCGGCCTCAGTGAGCGAGCGAGCGCGCAG |
| 36 | > dbDBA plasmid with M2 LSP and GAA nucleic acid |
| | TCTAGAGCTAGCATATGGATCCATCGATTTAGGGATAACAGGGTAATTATCAGCACACAATTGCCCATTATACGCGCGTATAATGGACTATTGTGTGCTGATATCTGTACACTTAAGGGCTAGATCTTAGCTTACGTCACTAGAG |
| | GGTCCACGTTTAGTTTTTAAGATCCATTGATCTCCTAAACGCTGCAAGATTCGCAACCTGGTATACTTAGCCTAGGCGCTAGGTCCTAGTGCAGCGGGACTTTTTTTCTAAAGTCGTTGAGAGGAGGAGTCGTCAGACCAGATAG |
| | CTTTGATGTCCTGATCGGAAGGATCGTTGGCCCCCCTGCAGGCAGCTGTTAATTAACTGCGCGCTCGCTCGCTCACTGAGGCCGCCCGGGCAAAGCCCGGGCGTCGGGCGACCTTTGGTCGCCCGGCCTCAGTGAGCGAGCGAGC |
| | GCGCAGAGAGGGAGTGGCCAACTCCATCACTAGGGGTTCCTTGTAGTTAATGATTAACCCGCCATGCTACTTATCTACGGCGCGCCACGCGTTCTAGGAGTTAATTTTTAAAAAGCAGTCAAAAGTCCAAGTGCCCTTGCGAGCA |
| | TTTACTCTCTCTGTTTGCTCTGGTTAATAATCTCAGGAGCACAAACATTCCTTACTAGTTCTAGGAGTTAATTTTTAAAAAGCAGTCAAAAGTCCAAGTGCCCTTGCGAGCATTTACTCTCTCTGTTTGCTCTGGTTAATAATCT |
| | CAGGAGCACAAACATTCCTTACTAGTTCTAGAGCGGCCGCCAGTGTGCTGGAATTCGGCTTTTTTAGGGCTGGAAGCTACCTTTGACATCATTTCCTCTGCGAATGCATGTATAATTTCTACAGAACCTATTAGAAAGGATCACC |
| | CAGCCTCTGCTTTTGTACAACTTTCCCTTAAAAAACTGCCAATCCCACTGCTGTTTGGCCCAATAGTGAGAACTTTTTCCTGCTGCCTCTTGGTGCTTTTGCCTATGGCCCCTATTCTGCCTGCTGAAGACACTCTTGCCAGCAT |
| | GGACTTAAACCCCTCCAGCTCTGACAATCCTCTTTCTCTTTTGTTTTACATGAAGGGTCTGGCAGCCAAAGCAATCACTCAAAGTTCAAACCTTATCATTTTTTGCTTTGTTCCTCTTGGCCTTGGTTTTGTACATCAGCTGTGA |
| | AAATACCATCCCAGGGTATTTATAGCTGGGGTTAATTTATAACTGAGAGTGCTCTAGTTCTGCAATACAGGACATGCTATAAAAATGGAAAGATGTTGCTTTCTGAGAGATCAGCTTACATGTGCTAGCGTAGCCAACCATGGGA |
| | GTGAGGCACCCGCCCTGCTCCCACCGGCTCCTGGCCGTCTGCGCCCTCGTGTCCTTGGCAACCGCTGCACTCCTGGGGCACATCCTACTCCATGATTTCCTGCTGGTTCCCCGAGAGCTGAGTGGCTCCTCCCCAGTCCTGGAGG |
| | AGACTCACCCAGCTCACCAGCAGGGAGCCAGCAGACCAGGGCCCCGGGACGCCCAGGCACACCCCGGCCGTCCCAGAGCAGTGCCCACACAGTGCGACGTCCCCCCCAACAGCCGCTTCGATTGCGCCCCTGACAAGGCCATCAC |
| | CCAGGAACAGTGCGAGGCCCGCGGCTGCTGCTACATCCCTGCAAAGCAGGGGCTGCAGGGAGCCCAGATGGGGCAGCCCTGGTGCTTCTTCCCACCCAGCTACCCCAGCTACAAGCTGGAGAACCTGAGCTCCTCTGAAATGGGC |
| | TACACGGCCACCCTGACCCGTACCACCCCCACCTTCTTCCCCAAGGACATCCTGACCCTGCGGCTGGACGTGATGATGGAGACTGAGAACCGCCTCCACTTCACGATCAAAGATCCAGCTAACAGGCGCTACGAGGTGCCCTTGG |
| | AGACCCCGCGTGTCCACAGCCGGGCACCGTCCCCACTCTACAGCGTGGAGTTCTCCGAGGAGCCCTTCGGGGTGATCGTGCACCGGCAGCTGGACGGCCGCGTGCTGCTGAACACGACGGTGGCGCCCCTGTTCTTTGCGGACCA |
| | GTTCCTTCAGCTGTCCACCTCGCTGCCCTCGCAGTATATCACAGGCCTCGCCGAGCACCTCAGTCCCCTGATGCTCAGCACCAGCTGGACCAGGATCACCCTGTGGAACCGGGACCTTGCGCCCACGCCCGGTGCGAACCTCTAC |
| | GGGTCTCACCCTTTCTACCTGGCGCTGGAGGACGGCGGGTCGGCACACGGGGTGTTCCTGCTAAACAGCAACGCCATGGACGTGGTCCTGCAGCCGAGCCCTGCCCTTAGCTGGAGGTCGACAGGTGGGATCCTGGACGTCTACA |
| | TCTTCCTGGGCCCAGAGCCCAAGAGCGTGGTGCAGCAGTACCTGGACGTGGTGGGATACCCGTTCATGCCGCCATACTGGGGCCTGGGCTTCCACCTGTGCCGCTGGGGCTACTCCTCCACCGCTATCACCCGCCAGGTGGTGGA |
| | GAACATGACCAGGGCCCACTTCCCCCTGGACGTCCAGTGGAACGATCTGGACTACATGGACTCCCGGAGGGACTTCACGTTCAACAAGGATGGCTTCCGGGACTTCCCGGCCATGGTGCAGGAGCTGCACCAGGGCGGCCGGCGC |
| | TACATGATGATCGTGGATCCTGCCATCAGCAGCTCGGGCCCTGCCGGGAGCTACAGGCCCTACGACGAGGGTCTGCGGAGGGGGGTTTTCATCACCAACGAGACCGGCCAGCCGCTGATTGGGAAGGTGTGGCCCGGGTCCACTG |
| | CCTTCCCCGACTTCACCAACCCCACAGCCCTGGCCTGGTGGGAGGACATGGTGGCTGAGTTCCATGACCAGGTGCCCTTCGACGGCATGTGGATTGACATGAACGAGCCTTCCAACTTCATCAGAGGCTCTGAGGACGGCTGCCC |
| | CAACAACGAGCTGGAGAACCCACCCTACGTGCCTGGGGTGGTTGGGGGGACCCTCCAGGCGGCCACCATCTGTGCCTCCAGCCACCAGTTTCTCTCCACACACTACAACCTGCACAACCTCTACGGCCTGACCGAAGCCATCGCC |
| | TCCCACAGGGCGCTGGTGAAGGCTCGGGGGACACGCCCATTTGTGATCTCCCGCTCGACCTTTGCTGGCCACGGCCGATACGCCGGCCACTGGACGGGGGACGTGTGGAGCTCCTGGGAGCAGCTCGCCTCCTCCGTGCCAGAAA |
| | TCCTGCAGTTTAACCTGCTGGGGGTGCCTCTGGTCGGGGCCGACGTCTGCGGCTTCCTGGGCAACACCTCAGAGGAGCTGTGTGTGCGCTGGACCCAGCTGGGGGCCTTCTACCCCTTCATGCGGAACCACAACAGCCTGCTCAG |
| | TCTGCCCCAGGAGCCGTACAGCTTCAGCGAGCCGGCCCAGCAGGCCATGAGGAAGGCCCTCACCCTGCGCTACGCACTCCTCCCCCACCTCTACACACTGTTCCACCAGGCCCACGTCGCGGGGGAGACCGTGGCCCGGCCCCTC |
| | TTCCTGGAGTTCCCCAAGGACTCTAGCACCTGGACTGTGGACCACCAGCTCCTGTGGGGGGAGGCCCTGCTCATCACCCCAGTGCTCCAGGCCGGGAAGGCCGAAGTGACTGGCTACTTCCCCTTGGGCACATGGTACGACCTGC |
| | AGACGGTGCCAATAGAGGCCCTTGGCAGCCTCCCACCCCCACCTGCAGCTCCCCGTGAGCCAGCCATCCACAGCGAGGGGCAGTGGGTGACGCTGCCGGCCCCCCTGGACACCATCAACGTGCACCTCCGGGCTGGGTACATCAT |
| | CCCCCTGCAGGGCCCTGGCCTCACAACCACAGAGTCCCGCCAGCAGCCCATGGCCCTGGCTGTGGCCCTGACCAAGGGTGGAGAGGCCCGAGGGGAGCTGTTCTGGGACGACGGAGAGAGCCTGGAAGTGCTGGAGCGAGGGGCC |
| | TACACACAGGTCATCTTCCTGGCCAGGAATAACACGATCGTGAATGAGCTGGTACGTGTGACCAGTGAGGGAGCTGGCCTGCAGCTGCAGAAGGTGACTGTCCTGGGCGTGGCCACGGCGCCCCAGCAGGTCCTCTCCAACGGTG |
| | TCCCTGTCTCCAACTTCACCTACAGCCCCGACACCAAGGTCCTGGACATCTGTGTCTCGCTGTTGATGGGAGAGCAGTTTCTCGTCAGCTGGTGTTGATAACTCGAGCCGGGCGGAGTGTGTTAGTCTCTCCAGAGGGAGGCTGG |
| | TTCCCCAGGGAAGCAGAGCCTGTGTGCGGGCAGCAGCTGTGTGCGGGCCTGGGGGTTGTTAAGTGCAATTATTTTTAATAAAAGGGGCATTTGGAAAAAAAAAAAAAAGGTAGCAGTCGACAGATGAATTCTGCAGATCTGTGGC |
| | TTCTAGCTGCCCGGGTGGCATCCCTGTGACCCCTCCCCAGTGCCTCTCCTGGCCCTGGAAGTTGCCACTCCAGTGCCCACCAGCCTTGTCCTAATAAAATTAAGTTGCATCATTTTGTCTGACTAGGTGTCCTTCTATAATATTA |
| | TGGGGTGGAGGGGGGTGGTATGGAGCAAGGGGCAAGTTGGGAAGACAACCTGTAGGGCCTGCGGGGTCTATTGGGAACCAAGCTGGAGTGCAGTGGCACAATCTTGGCTCACTGCAATCTCCGCCTCCTGGGTTCAAGCGATTCT |
| | CCTGCCTCAGCCTCCCGAGTTGTTGGGATTCCAGGCATGCATGACCAGGCTCAGCTAATTTTTGTTTTTTTGGTAGAGACGGGGTTTCACCATATTGGCCAGGCTGGTCTCCAACTCCTAATCTCAGGTGATCTACCCACCTTGG |
| | CCTCCCAAATTGCTGGGATTACAGGCGTGAACCACTGCTCCCTTCCCTGTCCTTCTGATTTTAAAAAAAAGAGAAATGTTCTGGCACCTGCACTTGCACTGGGGACAGCCTATTTTGCTAGTTTGTTTTGTTTCGTTTTGTTTTG |
| | ATGGAGAGCGTATGTTGTTTAAACGCGGCCGCGTAGATAAGTAGCATGGCGGGTTAATCATTAACTACAAGGAACCCCTAGTGATGGAGTTGGCCACTCCCTCTCTGCGCGCTCGCTCGCTCACTGAGGCCGGGCGACCAAAGGT |
| | CGCCCGACGCCCGGGCTTTGCCCGGGCGGCCTCAGTGAGCGAGCGAGCGCGCAGTTAATTAAGGCGCCCTAGGCCGACCCTTAGACTCTGTACTCAGTTCTATAAACGAGCCATTGGATACGAGATCCGTAGATTGATAAGGGAC |
| | ACGGAATATCCCCGGACGCAATAGACACCGGTGGACAGCTTGGTATCCTGAGCACAGTCGCGCGTCCGAATCTAGCTCTACTTTAGAGGCCCCGGATTCTGATGGTCGTAGACCGCAGAACCGATTGGGGGGATGAGATCTACTA |
| | GTTATCAGCACACAATTGCCCATTATACGCGCGTATAATGGACTATTGTGTGCTGATATAGGGATAACAGGGTAATTCTAGAGCTAGCATATGGATCCATCGATTTGATGCGGTATTTTCTCCTTACGCATCTGTGCGGTATTTC |
| | ACACCGCATACGTCAAAGCAACCATAGTACGCGCCCTGTAGCGGCGCATTAAGCGCGGCGGGTGTGGTGGTTACGCGCAGCGTGACCGCTACACTTGCCAGCGCCCTAGCGCCCGCTCCTTTCGCTTTCTTCCCTTCCTTTCTCG |
| | CCACGTTCGCCGGCTTTCCCCGTCAAGCTCTAAATCGGGGGCTCCCTTTAGGGTTCCGATTTAGTGCTTTACGGCACCTCGACCCCAAAAAACTTGATTTGGGTGATGGTTCACGTAGTGGGCCATCGCCCTGATAGACGGTTTT |
| | TCGCCCTTTGACGTTGGAGTCCACGTTCTTTAATAGTGGACTCTTGTTCCAAACTGGAACAACACTCAACTCTATCTCGGGCTATTCTTTTGATTTATAAGGGATTTTGCCGATTTCGGTCTATTGGTTAAAAAATGAGCTGATT |
| | TAACAAAAATTTAACGCGAATTTTAACAAAATATTAACGTTTACAATTTTATGGTGCACTCTCAGTACAATCTGCTCTGATGCCGCATAGTTAAGCCAGCCCCGACACCCGCCAACACCCGCTGACGCGCCCTGACGGGCTTGTC |
| | TGCTCCCGGCATCCGCTTACAGACAAGCTGTGACCGTCTCCGGGAGCTGCATGTGTCAGAGGTTTTCACCGTCATCACCGAAACGCGCGAGACGAAAGGGCCTCGTGATACGCCTATTTTTATAGGTTAATGTCATGATAATAAT |
| | GGTTTCTTAGACGTCAGGTGGCACTTTTCGGGGAAATGTGCGCGGAACCCCTATTTGTTTATTTTTCTAAATACATTCAAATATGTATCCGCTCATGAGACAATAACCCTGATAAATGCTTCAATAATATTGAAAAAGGAAGAGT |
| | ATGAGCCATATTCAACGGGAAACGTCGAGGCCGCGATTAAATTCCAACATGGATGCTGATTTATATGGGTATAAATGGGCTCGCGATAATGTCGGGCAATCAGGTGCGACAATCTATCGCTTGTATGGGAAGCCCGATGCGCCAG |
| | AGTTGTTTCTGAAACATGGCAAAGGTAGCGTTGCCAATGATGTTACAGATGAGATGGTCAGACTAAACTGGCTGACGGAATTTATGCCTCTTCCGACCATCAAGCATTTTATCCGTACTCCTGATGATGCATGGTTACTCACCAC |
| | TGCGATCCCCGGAAAAACAGCATTCCAGGTATTAGAAGAATATCCTGATTCAGGTGAAAATATTGTTGATGCGCTGGCAGTGTTCCTGCGCCGGTTGCATTCGATTCCTGTTTGTAATTGTCCTTTTAACAGCGATCGCGTATTT |
| | CGTCTCGCTCAGGCGCAATCACGAATGAATAACGGTTTGGTTGATGCGAGTGATTTTGATGACGAGCGTAATGGCTGGCCTGTTGAACAAGTCTGGAAAGAAATGCATAAACTTTTGCCATTCTCACCGGATTCAGTCGTCACTC |
| | ATGGTGATTTCTCACTTGATAACCTTATTTTTGACGAGGGGAAATTAATAGGTTGTATTGATGTTGGACGAGTCGGAATCGCAGACCGATACCAGGATCTTGCCATCCTATGGAACTGCCTCGGTGAGTTTTCTCCTTCATTACA |
| | GAAACGGCTTTTTCAAAAATATGGTATTGATAATCCTGATATGAATAAATTGCAGTTTCATTTGATGCTCGATGAGTTTTTCTAAGCGTATAATGGTCTAGAGCTAGCATATGGATCCATCGATTCCATTATACGCCTGTCAGAC |
| | CAAGTTTACTCATATATACTTTAGATTGATTTAAAACTTCATTTTTAATTTAAAAGGATCTAGGTGAAGATCCTTTTTGATAATCTCATGACCAAAATCCCTTAACGTGAGTTTTCGTTCCACTGAGCGTCAGACCCCGTAGAAA |
| | AGATCAAAGGATCTTCTTGAGATCCTTTTTTTCTGCGCGTAATCTGCTGCTTGCAAACAAAAAAACCACCGCTACCAGCGGTGGTTTGTTTGCCGGATCAAGAGCTACCAACTCTTTTTCCGAAGGTAACTGGCTTCAGCAGAGC |
| | GCAGATACCAAATACTGTTCTTCTAGTGTAGCCGTAGTTAGGCCACCACTTCAAGAACTCTGTAGCACCGCCTACATACCTCGCTCTGCTAATCCTGTTACCAGTGGCTGCTGCCAGTGGCGATAAGTCGTGTCTTACCGGGTTG |
| | GACTCAAGACGATAGTTACCGGATAAGGCGCAGCGGTCGGGCTGAACGGGGGGTTCGTGCACACAGCCCAGCTTGGAGCGAACGACCTACACCGAACTGAGATACCTACAGCGTGAGCTATGAGAAAGCGCCACGCTTCCCGAAG |
| | GGAGAAAGGCGGACAGGTATCCGGTAAGCGGCAGGGTCGGAACAGGAGAGCGCACGAGGGAGCTTCCAGGGGGAAACGCCTGGTATCTTTATAGTCCTGTCGGGTTTCGCCACCTCTGACTTGAGCGTCGATTTTTGTGATGCTC |
| | GTCAGGGGGGCGGAGCCTATGGAAAAACGCCAGCAACGCGGCCTTTTTACGGTTCCTGGCCTTTTGCTGGCCTTTTGCTCACATGT |
| 37 | > dbDBA plasmid with M3 LSP and GAA nucleic acid |
| | TCTAGAGCTAGCATATGGATCCATCGATTTAGGGATAACAGGGTAATTATCAGCACACAATTGCCCATTATACGCGCGTATAATGGACTATTGTGTGCTGATATCTGTACACTTAAGGGCTAGATCTTAGCTTACGTCACTAGAGG |
| | GTCCACGTTTAGTTTTTAAGATCCATTGATCTCCTAAACGCTGCAAGATTCGCAACCTGGTATACTTAGCCTAGGCGCTAGGTCCTAGTGCAGCGGGACTTTTTTTCTAAAGTCGTTGAGAGGAGGAGTCGTCAGACCAGATAGCT |
| | TTGATGTCCTGATCGGAAGGATCGTTGGCCCCCCTGCAGGCAGCTGTTAATTAACTGCGCGCTCGCTCGCTCACTGAGGCCGCCCGGGCAAAGCCCGGGCGTCGGGCGACCTTTGGTCGCCCGGCCTCAGTGAGCGAGCGAGCGCG |
| | CAGAGAGGGAGTGGCCAACTCCATCACTAGGGGTTCCTTGTAGTTAATGATTAACCCGCCATGCTACTTATCTACGGCGCGCCACGCGTTCTAGGAGTTAATTTTTAAAAAGCAGTCAAAAGTCCAAGTGCCCTTGCGAGCATTTA |
| | CTCTCTCTGTTTGCTCTGGTTAATAATCTCAGGAGCACAAACATTCCTTACTAGTTCTAGGAGTTAATTTTTAAAAAGCAGTCAAAAGTCCAAGTGCCCTTGCGAGCATTTACTCTCTCTGTTTGCTCTGGTTAATAATCTCAGGA |
| | GCACAAACATTCCTTACTAGTTCTAGAGCGGCCGCCAGTGTGCTGGAATTCGGCTTTTTTAGGGCTGGAAGCTACCTTTGACATCATTTCCTCTGCGAATGCATGTATAATTTCTACAGAACCTATTAGAAAGGATCACCCAGCCT |
| | CTGCTTTTGTACAACTTTCCCTTAAAAAACTGCCAATCCCACTGCTGTTTGGCCCAATAGTGAGAACTTTTTCCTGCTGCCTCTTGGTGCTTTTGCCTATGGCCCCTATTCTGCCTGCTGAAGACACTCTTGCCAGCATGGACTTA |
| | AACCCCTCCAGCTCTGACAATCCTCTTTCTCTTTTGTTTTACATGAAGGGTCTGGCAGCCAAAGCAATCACTCAAAGTTCAAACCTTATCATTTTTTGCTTTGTTCCTCTTGGCCTTGGTTTTGTACATCAGCTTTGAAAATACCA |
| | TCCCAGGGTTAATGCTGGGGTTAATTTATAACTGAGAGTGCTCTAGTTCTGCAATACAGGACATGCTATAAAAATGGAAAGATGTTGCTTTCTGAGAGATCAGCTTACATGTGCTAGCGTAGCCAACCATGGGAGTGAGGCACCCG |
| | CCCTGCTCCCACCGGCTCCTGGCCGTCTGCGCCCTCGTGTCCTTGGCAACCGCTGCACTCCTGGGGCACATCCTACTCCATGATTTCCTGCTGGTTCCCCGAGAGCTGAGTGGCTCCTCCCCAGTCCTGGAGGAGACTCACCCAGC |
| | TCACCAGCAGGGAGCCAGCAGACCAGGGCCCCGGGACGCCCAGGCACACCCCGGCCGTCCCAGAGCAGTGCCCACACAGTGCGACGTCCCCCCCAACAGCCGCTTCGATTGCGCCCCTGACAAGGCCATCACCCAGGAACAGTGCG |
| | AGGCCCGCGGCTGCTGCTACATCCCTGCAAAGCAGGGGCTGCAGGGAGCCCAGATGGGGCAGCCCTGGTGCTTCTTCCCACCCAGCTACCCCAGCTACAAGCTGGAGAACCTGAGCTCCTCTGAAATGGGCTACACGGCCACCCTG |
| | ACCCGTACCACCCCCACCTTCTTCCCCAAGGACATCCTGACCCTGCGGCTGGACGTGATGATGGAGACTGAGAACCGCCTCCACTTCACGATCAAAGATCCAGCTAACAGGCGCTACGAGGTGCCCTTGGAGACCCCGCGTGTCCA |
| | CAGCCGGGCACCGTCCCCACTCTACAGCGTGGAGTTCTCCGAGGAGCCCTTCGGGGTGATCGTGCACCGGCAGCTGGACGGCCGCGTGCTGCTGAACACGACGGTGGCGCCCCTGTTCTTTGCGGACCAGTTCCTTCAGCTGTCCA |
| | CCTCGCTGCCCTCGCAGTATATCACAGGCCTCGCCGAGCACCTCAGTCCCCTGATGCTCAGCACCAGCTGGACCAGGATCACCCTGTGGAACCGGGACCTTGCGCCCACGCCCGGTGCGAACCTCTACGGGTCTCACCCTTTCTAC |
| | CTGGCGCTGGAGGACGGCGGGTCGGCACACGGGGTGTTCCTGCTAAACAGCAACGCCATGGACGTGGTCCTGCAGCCGAGCCCTGCCCTTAGCTGGAGGTCGACAGGTGGGATCCTGGACGTCTACATCTTCCTGGGCCCAGAGCC |
| | CAAGAGCGTGGTGCAGCAGTACCTGGACGTGGTGGGATACCCGTTCATGCCGCCATACTGGGGCCTGGGCTTCCACCTGTGCCGCTGGGGCTACTCCTCCACCGCTATCACCCGCCAGGTGGTGGAGAACATGACCAGGGCCCACT |
| | TCCCCCTGGACGTCCAGTGGAACGATCTGGACTACATGGACTCCCGGAGGGACTTCACGTTCAACAAGGATGGCTTCCGGGACTTCCCGGCCATGGTGCAGGAGCTGCACCAGGGCGGCCGGCGCTACATGATGATCGTGGATCCT |
| | GCCATCAGCAGCTCGGGCCCTGCCGGGAGCTACAGGCCCTACGACGAGGGTCTGCGGAGGGGGGTTTTCATCACCAACGAGACCGGCCAGCCGCTGATTGGGAAGGTGTGGCCCGGGTCCACTGCCTTCCCCGACTTCACCAACCC |
| | CACAGCCCTGGCCTGGTGGGAGGACATGGTGGCTGAGTTCCATGACCAGGTGCCCTTCGACGGCATGTGGATTGACATGAACGAGCCTTCCAACTTCATCAGAGGCTCTGAGGACGGCTGCCCCAACAACGAGCTGGAGAACCCAC |
| | CCTACGTGCCTGGGGTGGTTGGGGGGACCCTCCAGGCGGCCACCATCTGTGCCTCCAGCCACCAGTTTCTCTCCACACACTACAACCTGCACAACCTCTACGGCCTGACCGAAGCCATCGCCTCCCACAGGGCGCTGGTGAAGGCT |
| | CGGGGGACACGCCCATTTGTGATCTCCCGCTCGACCTTTGCTGGCCACGGCCGATACGCCGGCCACTGGACGGGGGACGTGTGGAGCTCCTGGGAGCAGCTCGCCTCCTCCGTGCCAGAAATCCTGCAGTTTAACCTGCTGGGGGT |
| | GCCTCTGGTCGGGGCCGACGTCTGCGGCTTCCTGGGCAACACCTCAGAGGAGCTGTGTGTGCGCTGGACCCAGCTGGGGGCCTTCTACCCCTTCATGCGGAACCACAACAGCCTGCTCAGTCTGCCCCAGGAGCCGTACAGCTTCA |
| | GCGAGCCGGCCCAGCAGGCCATGAGGAAGGCCCTCACCCTGCGCTACGCACTCCTCCCCCACCTCTACACACTGTTCCACCAGGCCCACGTCGCGGGGGAGACCGTGGCCCGGCCCCTCTTCCTGGAGTTCCCCAAGGACTCTAGC |
| | ACCTGGACTGTGGACCACCAGCTCCTGTGGGGGGAGGCCCTGCTCATCACCCCAGTGCTCCAGGCCGGGAAGGCCGAAGTGACTGGCTACTTCCCCTTGGGCACATGGTACGACCTGCAGACGGTGCCAATAGAGGCCCTTGGCAG |
| | CCTCCCACCCCCACCTGCAGCTCCCCGTGAGCCAGCCATCCACAGCGAGGGGCAGTGGGTGACGCTGCCGGCCCCCCTGGACACCATCAACGTGCACCTCCGGGCTGGGTACATCATCCCCCTGCAGGGCCCTGGCCTCACAACCA |
| | CAGAGTCCCGCCAGCAGCCCATGGCCCTGGCTGTGGCCCTGACCAAGGGTGGAGAGGCCCGAGGGGAGCTGTTCTGGGACGACGGAGAGAGCCTGGAAGTGCTGGAGCGAGGGGCCTACACACAGGTCATCTTCCTGGCCAGGAAT |
| | AACACGATCGTGAATGAGCTGGTACGTGTGACCAGTGAGGGAGCTGGCCTGCAGCTGCAGAAGGTGACTGTCCTGGGCGTGGCCACGGCGCCCCAGCAGGTCCTCTCCAACGGTGTCCCTGTCTCCAACTTCACCTACAGCCCCGA |
| | CACCAAGGTCCTGGACATCTGTGTCTCGCTGTTGATGGGAGAGCAGTTTCTCGTCAGCTGGTGTTGATAACTCGAGCCGGGCGGAGTGTGTTAGTCTCTCCAGAGGGAGGCTGGTTCCCCAGGGAAGCAGAGCCTGTGTGCGGGCA |
| | GCAGCTGTGTGCGGGCCTGGGGGTTGTTAAGTGCAATTATTTTTAATAAAAGGGGCATTTGGAAAAAAAAAAAAAAGGTAGCAGTCGACAGATGAATTCTGCAGATCTGTGGCTTCTAGCTGCCCGGGTGGCATCCCTGTGACCCC |
| | TCCCCAGTGCCTCTCCTGGCCCTGGAAGTTGCCACTCCAGTGCCCACCAGCCTTGTCCTAATAAAATTAAGTTGCATCATTTTGTCTGACTAGGTGTCCTTCTATAATATTATGGGGTGGAGGGGGGTGGTATGGAGCAAGGGGCA |
| | AGTTGGGAAGACAACCTGTAGGGCCTGCGGGGTCTATTGGGAACCAAGCTGGAGTGCAGTGGCACAATCTTGGCTCACTGCAATCTCCGCCTCCTGGGTTCAAGCGATTCTCCTGCCTCAGCCTCCCGAGTTGTTGGGATTCCAGG |
| | CATGCATGACCAGGCTCAGCTAATTTTTGTTTTTTTGGTAGAGACGGGGTTTCACCATATTGGCCAGGCTGGTCTCCAACTCCTAATCTCAGGTGATCTACCCACCTTGGCCTCCCAAATTGCTGGGATTACAGGCGTGAACCACT |
| | GCTCCCTTCCCTGTCCTTCTGATTTTAAAAAAAAGAGAAATGTTCTGGCACCTGCACTTGCACTGGGGACAGCCTATTTTGCTAGTTTGTTTTGTTTCGTTTTGTTTTGATGGAGAGCGTATGTTGTTTAAACGCGGCCGCGTAGA |
| | TAAGTAGCATGGCGGGTTAATCATTAACTACAAGGAACCCCTAGTGATGGAGTTGGCCACTCCCTCTCTGCGCGCTCGCTCGCTCACTGAGGCCGGGCGACCAAAGGTCGCCCGACGCCCGGGCTTTGCCCGGGCGGCCTCAGTGA |
| | GCGAGCGAGCGCGCAGTTAATTAAGGCGCCCTAGGCCGACCCTTAGACTCTGTACTCAGTTCTATAAACGAGCCATTGGATACGAGATCCGTAGATTGATAAGGGACACGGAATATCCCCGGACGCAATAGACACCGGTGGACAGC |
| | TTGGTATCCTGAGCACAGTCGCGCGTCCGAATCTAGCTCTACTTTAGAGGCCCCGGATTCTGATGGTCGTAGACCGCAGAACCGATTGGGGGGATGAGATCTACTAGTTATCAGCACACAATTGCCCATTATACGCGCGTATAATG |
| | GACTATTGTGTGCTGATATAGGGATAACAGGGTAATTCTAGAGCTAGCATATGGATCCATCGATTTGATGCGGTATTTTCTCCTTACGCATCTGTGCGGTATTTCACACCGCATACGTCAAAGCAACCATAGTACGCGCCCTGTAG |
| | CGGCGCATTAAGCGCGGCGGGTGTGGTGGTTACGCGCAGCGTGACCGCTACACTTGCCAGCGCCCTAGCGCCCGCTCCTTTCGCTTTCTTCCCTTCCTTTCTCGCCACGTTCGCCGGCTTTCCCCGTCAAGCTCTAAATCGGGGGC |
| | TCCCTTTAGGGTTCCGATTTAGTGCTTTACGGCACCTCGACCCCAAAAAACTTGATTTGGGTGATGGTTCACGTAGTGGGCCATCGCCCTGATAGACGGTTTTTCGCCCTTTGACGTTGGAGTCCACGTTCTTTAATAGTGGACTC |
| | TTGTTCCAAACTGGAACAACACTCAACTCTATCTCGGGCTATTCTTTTGATTTATAAGGGATTTTGCCGATTTCGGTCTATTGGTTAAAAAATGAGCTGATTTAACAAAAATTTAACGCGAATTTTAACAAAATATTAACGTTTAC |
| | AATTTTATGGTGCACTCTCAGTACAATCTGCTCTGATGCCGCATAGTTAAGCCAGCCCCGACACCCGCCAACACCCGCTGACGCGCCCTGACGGGCTTGTCTGCTCCCGGCATCCGCTTACAGACAAGCTGTGACCGTCTCCGGGA |
| | GCTGCATGTGTCAGAGGTTTTCACCGTCATCACCGAAACGCGCGAGACGAAAGGGCCTCGTGATACGCCTATTTTTATAGGTTAATGTCATGATAATAATGGTTTCTTAGACGTCAGGTGGCACTTTTCGGGGAAATGTGCGCGGA |
| | ACCCCTATTTGTTTATTTTTCTAAATACATTCAAATATGTATCCGCTCATGAGACAATAACCCTGATAAATGCTTCAATAATATTGAAAAAGGAAGAGTATGAGCCATATTCAACGGGAAACGTCGAGGCCGCGATTAAATTCCAA |
| | CATGGATGCTGATTTATATGGGTATAAATGGGCTCGCGATAATGTCGGGCAATCAGGTGCGACAATCTATCGCTTGTATGGGAAGCCCGATGCGCCAGAGTTGTTTCTGAAACATGGCAAAGGTAGCGTTGCCAATGATGTTACAG |
| | ATGAGATGGTCAGACTAAACTGGCTGACGGAATTTATGCCTCTTCCGACCATCAAGCATTTTATCCGTACTCCTGATGATGCATGGTTACTCACCACTGCGATCCCCGGAAAAACAGCATTCCAGGTATTAGAAGAATATCCTGAT |
| | TCAGGTGAAAATATTGTTGATGCGCTGGCAGTGTTCCTGCGCCGGTTGCATTCGATTCCTGTTTGTAATTGTCCTTTTAACAGCGATCGCGTATTTCGTCTCGCTCAGGCGCAATCACGAATGAATAACGGTTTGGTTGATGCGAG |
| | TGATTTTGATGACGAGCGTAATGGCTGGCCTGTTGAACAAGTCTGGAAAGAAATGCATAAACTTTTGCCATTCTCACCGGATTCAGTCGTCACTCATGGTGATTTCTCACTTGATAACCTTATTTTTGACGAGGGGAAATTAATAG |
| | GTTGTATTGATGTTGGACGAGTCGGAATCGCAGACCGATACCAGGATCTTGCCATCCTATGGAACTGCCTCGGTGAGTTTTCTCCTTCATTACAGAAACGGCTTTTTCAAAAATATGGTATTGATAATCCTGATATGAATAAATTG |
| | CAGTTTCATTTGATGCTCGATGAGTTTTTCTAAGCGTATAATGGTCTAGAGCTAGCATATGGATCCATCGATTCCATTATACGCCTGTCAGACCAAGTTTACTCATATATACTTTAGATTGATTTAAAACTTCATTTTTAATTTAA |
| | AAGGATCTAGGTGAAGATCCTTTTTGATAATCTCATGACCAAAATCCCTTAACGTGAGTTTTCGTTCCACTGAGCGTCAGACCCCGTAGAAAAGATCAAAGGATCTTCTTGAGATCCTTTTTTTCTGCGCGTAATCTGCTGCTTGC |
| | AAACAAAAAAACCACCGCTACCAGCGGTGGTTTGTTTGCCGGATCAAGAGCTACCAACTCTTTTTCCGAAGGTAACTGGCTTCAGCAGAGCGCAGATACCAAATACTGTTCTTCTAGTGTAGCCGTAGTTAGGCCACCACTTCAAG |
| | AACTCTGTAGCACCGCCTACATACCTCGCTCTGCTAATCCTGTTACCAGTGGCTGCTGCCAGTGGCGATAAGTCGTGTCTTACCGGGTTGGACTCAAGACGATAGTTACCGGATAAGGCGCAGCGGTCGGGCTGAACGGGGGGTTC |
| | GTGCACACAGCCCAGCTTGGAGCGAACGACCTACACCGAACTGAGATACCTACAGCGTGAGCTATGAGAAAGCGCCACGCTTCCCGAAGGGAGAAAGGCGGACAGGTATCCGGTAAGCGGCAGGGTCGGAACAGGAGAGCGCACGA |
| | GGGAGCTTCCAGGGGGAAACGCCTGGTATCTTTATAGTCCTGTCGGGTTTCGCCACCTCTGACTTGAGCGTCGATTTTTGTGATGCTCGTCAGGGGGGGGAGCCTATGGAAAAACGCCAGCAACGCGGCCTTTTTACGGTTCCTG |
| | GCCTTTTGCTGGCCTTTTGCTCACATGT |
| 38 | > coGAA nucleic acid sequence w/o signal peptide |
| | CAGCAGGGGGCCAGCAGGCCAGGCCCCAGGGATGCCCAGGCCCACCCTGGCAGACCCAGGGCTGTGCCCACCCAGTGTGATGTGCCTCCCAACAGCAGATTTGACTGTGCCCCTGATAAGGCCATTACTCAGGAACAGTGTGAGGC |
| | CAGGGGCTGCTGCTATATCCCTGCCAAGCAGGGCCTGCAGGGGGCCCAGATGGGGCAGCCCTGGTGCTTCTTCCCCCCCAGCTACCCCTCTTATAAGCTGGAGAATCTGAGCAGCTCTGAAATGGGCTACACTGCCACTCTGACCA |
| | GGACTACCCCCACCTTCTTCCCCAAGGATATTCTGACTCTGAGGCTGGATGTGATGATGGAGACTGAGAACAGGCTGCACTTCACCATCAAGGACCCTGCCAACAGGAGGTATGAGGTGCCCCTGGAAACTCCCAGGGTGCACTCT |
| | AGGGCCCCCAGCCCCCTGTATTCTGTGGAGTTCTCTGAGGAGCCTTTTGGGGTCATTGTCCACAGGCAGCTGGATGGCAGGGTGCTGCTGAATACTACTGTGGCCCCTCTGTTCTTTGCTGACCAGTTCCTGCAGCTGAGCACCAG |
| | CCTGCCTTCTCAGTACATTACTGGCCTGGCTGAGCATCTGAGCCCCCTGATGCTGAGCACCTCTTGGACCAGAATCACCCTGTGGAACAGGGACCTGGCTCCCACTCCTGGGGCCAACCTGTATGGCAGCCACCCCTTCTACCTGG |
| | CCCTGGAGGATGGGGGCTCTGCCCATGGGGTGTTCCTGCTGAACAGCAATGCCATGGATGTGGTGCTGCAGCCCTCTCCTGCCCTGTCTTGGAGATCTACTGGGGGCATCCTGGATGTGTATATCTTCCTGGGGCCTGAGCCCAAG |
| | TCTGTGGTGCAGCAGTACCTGGATGTGGTGGGCTACCCCTTCATGCCCCCCTACTGGGGCCTGGGCTTCCACCTGTGCAGGTGGGGCTACTCTTCTACTGCTATCACCAGGCAGGTGGTGGAGAACATGACCAGGGCTCACTTCCC |
| | TCTGGATGTGCAGTGGAATGACCTGGACTACATGGACTCTAGGAGAGACTTCACTTTTAATAAGGATGGGTTCAGGGACTTTCCTGCCATGGTGCAGGAGCTGCATCAGGGGGGCAGGAGATATATGATGATTGTGGACCCTGCTA |
| | TTTCTAGCTCTGGCCCTGCTGGCAGCTATAGGCCCTATGATGAGGGGCTGAGGAGGGGGGTGTTCATCACTAATGAGACTGGCCAGCCCCTGATTGGCAAGGTGTGGCCTGGCTCTACTGCCTTCCCTGATTTCACCAACCCCACT |
| | GCCCTGGCCTGGTGGGAGGATATGGTGGCTGAGTTTCATGACCAGGTGCCCTTTGATGGCATGTGGATTGACATGAATGAGCCCAGCAACTTTATCAGGGGCTCTGAAGATGGCTGCCCCAACAATGAGCTGGAGAACCCCCCCTA |
| | TGTGCCTGGGGTGGTGGGGGGCACCCTGCAGGCTGCCACCATCTGTGCCAGCAGCCACCAGTTCCTGAGCACCCACTATAACCTGCACAACCTGTATGGCCTGACTGAGGCCATTGCCTCTCACAGGGCCCTGGTGAAGGCTAGGG |
| | GGACTAGGCCCTTTGTGATCAGCAGGTCTACTTTTGCTGGCCATGGCAGGTATGCTGGGCACTGGACTGGGGATGTGTGGTCTAGCTGGGAGCAGCTGGCCAGCTCTGTGCCTGAGATCCTGCAGTTTAATCTGCTGGGGGTGCCC |
| | CTGGTGGGGGCTGATGTGTGTGGCTTCCTGGGCAATACCTCTGAGGAGCTGTGTGTGAGGTGGACTCAGCTGGGGGCTTTCTACCCCTTCATGAGAAACCACAACTCTCTGCTGAGCCTGCCCCAGGAGCCCTATTCTTTTTCTGA |
| | GCCTGCCCAGCAGGCTATGAGGAAGGCCCTGACTCTGAGGTATGCCCTGCTGCCCCACCTGTATACCCTGTTCCATCAGGCCCATGTGGCTGGGGAGACTGTGGCCAGACCTCTGTTCCTGGAGTTCCCCAAGGATAGCTCTACTT |
| | GGACTGTGGACCACCAGCTGCTGTGGGGGGAGGCTCTGCTGATCACCCCTGTGCTGCAGGCTGGGAAGGCTGAGGTGACTGGCTATTTCCCCCTGGGCACCTGGTATGATCTGCAGACTGTGCCCATTGAGGCCCTGGGCTCTCTG |
| | CCCCCTCCCCCTGCTGCCCCCAGGGAGCCTGCCATCCACTCTGAGGGCCAGTGGGTGACCCTGCCTGCCCCTCTGGACACTATCAATGTGCACCTGAGGGCTGGCTACATCATCCCCCTGCAGGGCCCTGGCCTGACTACCACTGA |
| | GTCTAGGCAGCAGCCCATGGCCCTGGCTGTGGCTCTGACCAAGGGGGGGGAGGCCAGGGGGGAGCTGTTCTGGGATGATGGGGAGTCTCTGGAGGTGCTGGAGAGGGGGGCCTACACCCAGGTGATCTTCCTGGCTAGGAATAACA |
| | CCATTGTCAATGAGCTGGTGAGGGTGACCTCTGAGGGGGCTGGCCTGCAGCTGCAGAAGGTGACTGTGCTGGGGGTGGCTACTGCCCCCCAGCAGGTGCTGAGCAATGGGGTGCCTGTGAGCAACTTCACCTATAGCCCTGACACC |
| | AAGGTGCTGGACATCTGTGTGAGCCTGC! TGATGGGGGAGCAGTTCCTGGTGAGCTGGTGCTAA |
| 39 | > coGAA GAA nucleic acid |
| | ATGGGAGTGAGGCACCCCCCCTGCTCCCATAGACTCCTGGCTGTCTGTGCCCTGGTGTCCTTGGCAACAGCTGCACTC |
| | CAGCAGGGGGCCAGCAGGCCAGGCCCCAGGGATGCCCAGGCCCACCCTGGCAGACCCAGGGCTGTGCCCACCCAGTGTGATGTGCCTCCCAACAGCAGATTTGACTGTGCCCCTGATAAGGCCATTACTCAGGAACAGTGTGAGG |
| | CCAGGGGCTGCTGCTATATCCCTGCCAAGCAGGGCCTGCAGGGGGCCCAGATGGGGCAGCCCTGGTGCTTCTTCCCCCCCAGCTACCCCTCTTATAAGCTGGAGAATCTGAGCAGCTCTGAAATGGGCTACACTGCCACTCTGAC |
| | CAGGACTACCCCCACCTTCTTCCCCAAGGATATTCTGACTCTGAGGCTGGATGTGATGATGGAGACTGAGAACAGGCTGCACTTCACCATCAAGGACCCTGCCAACAGGAGGTATGAGGTGCCCCTGGAAACTCCCAGGGTGCAC |
| | TCTAGGGCCCCCAGCCCCCTGTATTCTGTGGAGTTCTCTGAGGAGCCTTTTGGGGTCATTGTCCACAGGCAGCTGGATGGCAGGGTGCTGCTGAATACTACTGTGGCCCCTCTGTTCTTTGCTGACCAGTTCCTGCAGCTGAGCA |
| | CCAGCCTGCCTTCTCAGTACATTACTGGCCTGGCTGAGCATCTGAGCCCCCTGATGCTGAGCACCTCTTGGACCAGAATCACCCTGTGGAACAGGGACCTGGCTCCCACTCCTGGGGCCAACCTGTATGGCAGCCACCCCTTCTA |
| | CCTGGCCCTGGAGGATGGGGGCTCTGCCCATGGGGTGTTCCTGCTGAACAGCAATGCCATGGATGTGGTGCTGCAGCCCTCTCCTGCCCTGTCTTGGAGATCTACTGGGGGCATCCTGGATGTGTATATCTTCCTGGGGCCTGAG |
| | CCCAAGTCTGTGGTGCAGCAGTACCTGGATGTGGTGGGCTACCCCTTCATGCCCCCCTACTGGGGCCTGGGCTTCCACCTGTGCAGGTGGGGCTACTCTTCTACTGCTATCACCAGGCAGGTGGTGGAGAACATGACCAGGGCTC |
| | ACTTCCCTCTGGATGTGCAGTGGAATGACCTGGACTACATGGACTCTAGGAGAGACTTCACTTTTAATAAGGATGGGTTCAGGGACTTTCCTGCCATGGTGCAGGAGCTGCATCAGGGGGGCAGGAGATATATGATGATTGTGGA |
| | CCCTGCTATTTCTAGCTCTGGCCCTGCTGGCAGCTATAGGCCCTATGATGAGGGGCTGAGGAGGGGGGTGTTCATCACTAATGAGACTGGCCAGCCCCTGATTGGCAAGGTGTGGCCTGGCTCTACTGCCTTCCCTGATTTCACC |
| | AACCCCACTGCCCTGGCCTGGTGGGAGGATATGGTGGCTGAGTTTCATGACCAGGTGCCCTTTGATGGCATGTGGATTGACATGAATGAGCCCAGCAACTTTATCAGGGGCTCTGAAGATGGCTGCCCCAACAATGAGCTGGAGA |
| | ACCCCCCCTATGTGCCTGGGGTGGTGGGGGGCACCCTGCAGGCTGCCACCATCTGTGCCAGCAGCCACCAGTTCCTGAGCACCCACTATAACCTGCACAACCTGTATGGCCTGACTGAGGCCATTGCCTCTCACAGGGCCCTGGT |
| | GAAGGCTAGGGGGACTAGGCCCTTTGTGATCAGCAGGTCTACTTTTGCTGGCCATGGCAGGTATGCTGGGCACTGGACTGGGGATGTGTGGTCTAGCTGGGAGCAGCTGGCCAGCTCTGTGCCTGAGATCCTGCAGTTTAATCTG |
| | CTGGGGGTGCCCCTGGTGGGGGCTGATGTGTGTGGCTTCCTGGGCAATACCTCTGAGGAGCTGTGTGTGAGGTGGACTCAGCTGGGGGCTTTCTACCCCTTCATGAGAAACCACAACTCTCTGCTGAGCCTGCCCCAGGAGCCCT |
| | ATTCTTTTTCTGAGCCTGCCCAGCAGGCTATGAGGAAGGCCCTGACTCTGAGGTATGCCCTGCTGCCCCACCTGTATACCCTGTTCCATCAGGCCCATGTGGCTGGGGAGACTGTGGCCAGACCTCTGTTCCTGGAGTTCCCCAA |
| | GGATAGCTCTACTTGGACTGTGGACCACCAGCTGCTGTGGGGGGAGGCTCTGCTGATCACCCCTGTGCTGCAGGCTGGGAAGGCTGAGGTGACTGGCTATTTCCCCCTGGGCACCTGGTATGATCTGCAGACTGTGCCCATTGAG |
| | GCCCTGGGCTCTCTGCCCCCTCCCCCTGCTGCCCCCAGGGAGCCTGCCATCCACTCTGAGGGCCAGTGGGTGACCCTGCCTGCCCCTCTGGACACTATCAATGTGCACCTGAGGGCTGGCTACATCATCCCCCTGCAGGGCCCTG |
| | GCCTGACTACCACTGAGTCTAGGCAGCAGCCCATGGCCCTGGCTGTGGCTCTGACCAAGGGGGGGGAGGCCAGGGGGGAGCTGTTCTGGGATGATGGGGAGTCTCTGGAGGTGCTGGAGAGGGGGGCCTACACCCAGGTGATCTT |
| | CCTGGCTAGGAATAACACCATTGTCAATGAGCTGGTGAGGGTGACCTCTGAGGGGGCTGGCCTGCAGCTGCAGAAGGTGACTGTGCTGGGGGTGGCTACTGCCCCCCAGCAGGTGCTGAGCAATGGGGTGCCTGTGAGCAACTTC |
| | ACCTATAGCCCTGACACCAAGGTGCTGGACATCTGTGTGAGCCTGCTGATGGGGGAGCAGTTCCTGGTGAGCTGGTGCTAA |
| 40 | >5′ UTR\|SERPINA7 |
| | CAGGTGGATTCTTGGGCATTTGCTTAAGCTTGGTACCGCCACC |
| 41 | > 5′ UTR\|24BP |
| | CAGGTGGATTCTTGGGCATTTGCT |
| 42 | >FL-POLYA |
| | ATCTGTGGCTTCTAGCTGCCCGGGTGGCATCCCTGTGACCCCTCCCCAGTGCCTCTCCTGGCCCTGGAAGTTGCCACTCCAGTGCCCACCAGCCTTGTCCTAATAAAATTAAGTTGCATCATTTTGTCTGACTAGGTGTCCTTCT |
| | ATAATATTATGGGGTGGAGGGGGGTGGTATGGAGCAAGGGGCAAGTTGGG |
| 43 | CTGTGGCTTCTAGCTGCCCGGGTGGCATCCCTGTGACCCCTCCCCAGTGCCTCTCCTGGCCCTGGAAGTTGCCACTCCAGTGCCCACCAGCCTTGTCCTAATAAAATTAAGTTGCATCATTTTGTCTGACTAGGTGTCCTTCTAT |
| | AATATTATGGGGTGGAGGGGGGTGGTATGGAGCAAGGGGCAAGTTGGG |
| 44 | >FL-POLYA plus AATAA signal |
| | CTGTGGCTTCTAGCTGCCCGGGTGGCATCCCTGTGACCCCTCCCCAGTGCCTCTCCTGGCCCTGGAAGTTGCCACTCCAGTGCCCACCAGCCTTGTCCTAATAAAATTAAGTTGCATCATTTTGTCTGACTAGGTGTCCTTCTAT |
| | AATATTATGGGGTGGAGGGGGGTGGTATGGAGCAAGGGGCAAGTTGGG |
| 45 | >REV RNA POLII_TERMINATOR |
| | AGAGAAATGTTCTGGCACCTGCACTTGCACTGGGGACAGCCTATTTTGCTAGTTTGTTTTGTTTCGTTTTGTTTTGATGGAGAGCGTATGTT |
| 46 | >Stuffer DNA with 48 bp synthetic polyA |
| | GTCCTTCAACGTCGAACTGTAGCACTCTGGATAGCTAGCTAGCGTTTGTAGATAGTTTCAAGGATAGCAACCAACAACACGATAGTTTAGAAATTGTTCTAGATCTTCTGCTACTACTCGAGAGATAGTTGACTTCTAGAAGACT |
| | CTGGATAGAGAGCTTCCTGTGGTTTCTATTTCAACACTTCGAGCGATTTAGATAGAGGCGTCAATTGAGAACAAAAACTGGACACCTGTTTCTAGAACACTAGTGCTAGTCTTCTCAAGGCTTGATACGTCCTGCCACTCACACA |
| | CAAAAAACCAACACACAGATTAATGAAAATAAAGATCTTTTATTAGAGAGCGAGTGGATAGTTTAGAGTCGCTTGAGACTTATCCTGTGTCCAACTAGCCAAGAGTAGAGAGAGAGTGACTAGGTGGATCGAGAGATCGTCGTCT |
| | ATTTGACTGCTAGCCTGTGTTCTCGTCGTAGTCCAAATCTTCAATACTCTGGCGACTAGTAACTTGAATCTGTGTATCTAACACGACAAGGCTACTCCTTTGAGTTTCTAGTGATAAGTGCGACTGGATCTAGCTAGTTGAGTTT |
| | CTAGAAACTACGTCCAAAGCTACTAGCACTA |
| 47 | >synthetic polyA |
| | CACACAAAAAACCAACACACAGATTAATGAAAATAAAGATCTTTTATT |
| 48 | >3′UTR |
| | AGCCGGGCGGAGTGTGTTAGTCTCTCCAGAGGGAGGCTGGTTCCCCAGGGAAGCAGAGCCTGTGTGCGGGCAGCAGCTGTGTGCGGGCCTGGGGGTTG |
| 49 | >3′UTR |
| | CCGGGCGGAGTGTGTTAGTCTCTCCAGAGGGAGGCTGGTTCCCCAGGGAAGCAGAGCCTGTGTGCGGGCAGCAGCTGTGTGCGGGCCTGGGGGTTG |
| 50 | >GAA 3′UTR |
| | CCGGGCGGAGTGTGTTAGTCTCTCCAGAGGGAGGCTGGTTCCCCAGGGAAGCAGAGCCTGTGTGCGGGCAGCAGCTGTGTGCGGGCCTGGGGGTTGTTAAGTGCAATTATTTTTAATAAAAGGGGCATTTGGAAAAAAAAAAAAA |
| | AGGTAGCAGTCGACAGATGA |
| 51 | >endogenous wtGAA signal peptide |
| | ATGGGAGTGAGGCACCCCCCCTGCTCCCATAGACTCCTGGCTGTCTGTGCCCTGGTGTCCTTGGCAACAGCTGCACTC |
| 52 | >N-terminal deletion of GAA nucleic acid sequence |
| | ATGGGAGTGAGGCACCCCCCCTGCTCCCATAGACTCCTGGCTGTCTGTGCCCTGGTGTCCTTGGCAACAGCTGCACTCCTGGGGCACATCCTACTCCATGATTTCCTGCTGGTTCCCAGAGAGCTGAGTGGCTCCTCCCCAGTCC |
| | TGGAGGAGACTCACCCAGCTCAC |
| 53 | >nucleotide of codon optimized GAA signal peptide |
| | ATGGGAGTGAGGCACCCGCCCTGCTCCCACCGGCTCCTGGCCGTCTGCGCCCTCGTGTCCTTGGCAACCGCTGCACTCCTG |
| 54 | >nucleotide of 201 signal peptide |
| | ATGGAGTTCGGGCTGAGCTGGGTCTTTCTGGTGGCCCTGCTGAAGGGAGTCCAGTGCGAG |
| 55 | >nucleotide of wt IL2 signal peptide |
| | ATGTACCGTATGCAGCTGCTGTCCTGCATCGCACTGTCACTGGCACTGGTTACCAACTCA |
| 56 | >nucleotide of mut IL2 signal peptide |
| | ATGTACCGTATGCAGCTGCTGCTGCTGATCGCACTGTCACTGGCACTGGTTACCAACTCA |
| 57 | >nucleotide of 2AM signal peptide |
| | ATGGGGAAGAACAAACTCCTTCATCCAAGTCTGGTTCTTCTCCTCTTGGTCCTCCTGCCCACAGATGCC |
| 58 | >nucleotide of PZP signal peptide |
| | ATGAGAAAAGACAGACTTCTTCATTTATGTCTTGTGCTACTTCTTATCCTGCTTTCTGCCAGTGACTCAAACTCT |
| 59 | >endogenous GAA signal peptide |
| | MGVRHPPCSHRLLAVCALVSLATAALL |
| 60 | >201 signal peptide |
| | MEFGLSWVFLVALLKGVQCE |
| 61 | >wt IL2 signal peptide |
| | MYRMQLLSCIALSLALVTNS |
| 62 | >mut IL2 signal peptide |
| | MYRMQLLLLIALSLALVTNS |
| 63 | >A2M signal peptide |
| | MGKNKLLHPSLVLLLLVLLPTDA |
| 64 | >PZP signal peptide |
| | MRKDRLLHLCLVLLLILLSASDSNS |
| 65 | >artificial signal peptide |
| | MWWRLWWLLLLLLLLWPMVWA |
| 66 | > cathpetsin L signal peptide |
| | LLLLAVLCLGT |
| 67 | >nucleotide of hAAT signal peptide |
| | ATGCCGTCTTCTGTCTCGTGGGGCATCCTCCTGCTGGCAGGCCTGTGCTGCCTGGTCCCTGTCTCCCTGGCT |
| 68 | > FIBrat Signal Peptide |
| | MLRGPGPGRLLLLAVLCLGTSVRCTETGKSKR |
| 69 | > FIBrat Signal Peptide |
| | MLRGPGPGRLLLLAVLCLGTSVRCTETGKSKRLALQIV |
| 70 | >FN1 human signal peptide |
| | MLRGPGPGLLLLAVQCLGTAVPSTGA |
| 71 | >FN1 x. leavis signal peptide |
| | MRRGALTGLLLVLCLSVVLRAAPSATSKKRR |
| 72 | >hIGF2 signal peptide |
| | ATGGGAATCCCAATGGGGAAGTCGATGCTGGTGCTTCTCACCTTCTTGGCCTTCGCCTCGTGCTGCATTGCT |
| 73 | >FN1 rat signal peptide |
| | ATGCTCAGGGGTCCGGGACCCGGGCGGCTGCTGCTGCTAGCAGTCCTGTGCCTGGGGACATCGGTGCGCTGCACCGAAACCGGGAAGAGCAAGAGG |
| 74 | >FN1 rat signal peptide |
| | ATG CTC AGG GGT CCG GGA CCC GGG CGG CTG CTG CTG CTA GCA GTC CTG TGC CTG GGG ACA TCG GTG CGC TGC ACC GAA ACC GGG AAG AGC AAG AGG CAG GCT CAG CAA |
| | ATC GTG-3′. |
| 75 | >FN1 human signal peptide |
| | ATGCTTAGGGGTCCGGGGCCCGGGCTGCTGCTGCTGGCCGTCCAGTGCCTGGGGACAGCGGTGCCCTCCACGGGAGCC |
| 76 | >FN1 x. leavis signal peptide |
| | ATG CGC CGG GGG GCC CTG ACC GGG CTG CTC CTG GTC CTG TGC CTG AGT GTT GTG CTA CGT GCA GCC CCC TCT GCA ACA AGC AAG AAG CGC AGG |
| 77 | > preprocathepsin L signal peptide (rat) |
| | MTPLLLLAVLCLGTALA |
| 78 | >prepro-alpha 2 type collagen signal peptide (homo sapiens) |
| | MLSFVDTRTLLLLAVTLCLATC |
| 79 | >SEQ 79 CTGCGCGCTCGCTCGCTCACTGAGGCCGCCCGGGCAAAGCCCGGGCGTCGGGCGACCTTTGGTCGCCCGGCCTCAGTGAGCGAGCGAGCGCGCAGAGAGGGAGTGGCCAACTCCATCACTAGGGGTTCCT |
| 80 | >SEQ 80 AGGAACCCCTAGTGATGGAGTTGGCCACTCCCTCTCTGCGCGCTCGCTCGCTCACTGAGGCCGGGCGACCAAAGGTCGCCCGACGCCCGGGCTTTGCCCGGGCGGCCTCAGTGAGCGAGCGAGCGCGCAG |
| 81 | >SEQ 81 CTGCGCGCTCGCTCGCTCACTGAGGCCGCCCGGGCAAAGCCCGGGCGTCGGGCGACCTTTGGTCGCCCGGCCTCAGTGAGCGAGCGAGCGCGCAGAGAGGGAGTGGCCAACTCCATCACTAGGG |
| 82 | >SEQ 82 |
| | AGGAACCCCTAGTGATGGAGTTGGCCACTCCCTCTCTGCGCGCTCGCTCGCTCACTGAGGCCGGGCGACCAAAGGTCGCCCGACGCCCGGGCTTTGCCCGGGCGGCCTCAGTGAGCGAGCGAGCGCGCAG |
| 83 | > MH-257 ITR |
| | AGGAACCCCTAGTGATGGAGTTGGCCACTCCCTCTCTGCGCGCTCGCTCGCTCACTGAGGCAATTTGATAAAAATCGTCAAATTATAAACAGGCTTTGCCTGTTTAGCCTCAGTGAGCGAGCGAGCGCGCAGAGAGGGAGTGGCC |
| | AACTCCATCACTAGGGGTTCCT |
| 84 | >MH-258 ITR |
| | AGGAACCCCTAGTGATGGAGTTGGCCACTCCCTCTCTGCGCGCTCGCTCGCTCACTGAGGGATAAAAATCCAGGCTTTGCCTGCCTCAGTGAGCGAGCGAGCGCGCAGAGAGGGAGTGGCCAACTCCATCACTAGGGGTTCCT |
| 85 | >MH Delta |
| | 258AGGAACCCCTAGTGATGGAGTTGGCCACTCCCTCTCTGCGCGCTCGCTCGCTCACTGAGGGATAAAAATCCAGGCTTTGCCTGCCTCAGTGAGCGAGCGAGCGCGCAGAGAGGGAGTGGCCAACTCCATCACTAGGGGTTCC |
| | T |
| 100 | >MH Telomere-1 ITR |
| | AGGAACCCCTAGTGATGGAGTTGGCCACTCCCTCTCTGGGATTGGGATTGCGCGCTCGCTCGCGGGATTGGGATTGGGATTGGGATTGGGATTGGGATTGATAAAAATCAATCCCAATCCCAATCCCAATCCCAATCCCAATCCC |
| | GCGAGCGAGCGCGCAATCCCAATCCCAGAGAGGGAGTGGCCAACTCCATCACTAGGGGTTCCT |
| 101 | >MH Telomere-2 ITR |
| | AGGAACCCCTAGTGATGGAGTTGGCCACTCCCTCTCTGCGCGCTCGCTCGCTCGGGATTGGGATTGGGATTGGGATTGGGATTGGGATTGATAAAAATCAATCCCAATCCCAATCCCAATCCCAATCCCAATCCCGCGAGCGAGC |
| | GCGCAGGAGAGGGAGTGGCCAACTCCATCACTAGGGGTTCCTAAGCTTATTATA |
| 102 | >MH PolII 258 ITR |
| | AGGAACCCCTAGTGATGGAGTTGGCCACTCCCTCTCTGCGCGCTCGCTCGCTCACTGAGGGCGCCTATAAAGATAAAAATCCAGGCTTTGCCTGCCTCAGTTAGCGAGCGAGCGCGCAGAGAGGGAGTGGCCAACTCCATCACTA |
| | GGGGTTCCT |
| 103 | >MH 258 Delta D conservative |
| | CTAGTGATGGAGTTGGCCACTCCCTCTCTGCGCGCTCGCTCGCTCACTGAGGGATAAAAATCCAGGCTTTGCCTGCCTCAGTGAGCGAGCGAGCGCGCAGAGAGGGAGTGGCCAACTCCATCACTAG |
| 104 | >5′ AAV2-ITR |
| | TTGGCCACTCCCTCTCTGCGCGCTCGCTCGCTCACTGAGGCCGGGCGACCAAAGGTCGCCCGACGCCCGGGCTTTGCCCGGGCGGCCTCAGTGAGCGAGCGAGCGCGCAGAGAGGGAGTGGCCAACTCCATCACTAGGGGTTCCT |
| 105 | >3′ AAV2 ITR |
| | AGGAACCCCTAGTGATGGAGTTGGCCACTCCCTCTCTGCGCGCTCGCTCGCTCACTGAGGCCGGGCGACCAAAGGTCGCCCGACGCCCGGGCTTTGCCCGGGCGGCCTCAGTGAGCGAGCGAGCGCGCAGAGAGGGAGTGGCCAA |
| 448 | > ITR (145 bp) |
| | AGGAACCCCTAGTGATGGAGTTGGCCACTCCCTCTCTGCGCGCTCGCTCGCTCACTGAGGCCGGGCGACCAAAGGTCGCCCGACGCCCGGGCTTTGCCCGGGCGGCCTCAGTGAGCGAGCGAGCGCGCAGAGAGGGAGTGGCCAA |
| 449 | > ITR (lacking 9 bp) |
| | AGGAACCCCTAGTGATGGAGTTGGCCACTCCCTCTCTGCGCGCTCGCTCGCTCACTGAGGCCGGGCGACCAAAGGTCGCCCGACGCCCGGGCTTTGCCCGGGCGGCCTCAGTGAGCGAGCGAGCGCGCAGAGAGGG |
| 450 | >CRE0052 |
| | GGGCATATAAAACAGGGGCAAGGCACAGACTCATAGCAGAGCAATCACCACCAAGCCTGGAATAACTGCAGCCACC |
| 451 | > pAAV-LSPhGAA \|Actus101 plasmid |
| | CTGCGCGCTCGCTCGCTCACTGAGGCCGCCCGGGCAAAGCCCGGGCGTCGGGCGACCTTTGGTCGCCCGGCCTCAGTGAGCGAGCGAGCGCGCAGAGAGGGAGTGGCCAACTCCATCACTAGGGGTTCCTGGAGGGGTGGAGTCG |
| | TGACGTGAATTACGTCATAGGGTTAGGGAGGTCGGCCGCTCTAGGAGTTAATTTTTAAAAAGCAGTCAAAAGTCCAAGTGCCCTTGCGAGCATTTACTCTCTCTGTTTGCTCTGGTTAATAATCTCAGGAGCACAAACATTCCTT |
| | ACTAGTTCTAGGAGTTAATTTTTAAAAAGCAGTCAAAAGTCCAAGTGCCCTTGCGAGCATTTACTCTCTCTGTTTGCTCTGGTTAATAATCTCAGGAGCACAAACATTCCTTACTAGTTCTAGAGCGGCCGCCAGTGTGCTGGAA |
| | TTCGGCTTTTTTAGGGCTGGAAGCTACCTTTGACATCATTTCCTCTGCGAATGCATGTATAATTTCTACAGAACCTATTAGAAAGGATCACCCAGCCTCTGCTTTTGTACAACTTTCCCTTAAAAAACTGCCAATCCCACTGCTG |
| | TTTGGCCCAATAGTGAGAACTTTTTCCTGCTGCCTCTTGGTGCTTTTGCCTATGGCCCCTATTCTGCCTGCTGAAGACACTCTTGCCAGCATGGACTTAAACCCCTCCAGCTCTGACAATCCTCTTTCTCTTTTGTTTTACATGA |
| | AGGGTCTGGCAGCCAAAGCAATCACTCAAAGTTCAAACCTTATCATTTTTTGCTTTGTTCCTCTTGGCCTTGGTTTTGTACATCAGCTTTGAAAATACCATCCCAGGGTTAATGCTGGGGTTAATTTATAACTGAGAGTGCTCTA |
| | GTTCTGCAATACAGGACATGCTATAAAAATGGAAAGATGTTGCTTTCTGAGAGATCAGCTTACATGTGGTACCGAGCTCGGATCCACTAGTAACGGCCGCCAGTGTGCTGGAATTCGGCTTTCCAGGCCATCTCCAACCATGGGA |
| | GTGAGGCACCCGCCCTGCTCCCACCGGCTCCTGGCCGTCTGCGCCCTCGTGTCCTTGGCAACCGCTGCACTCCTGGGGCACATCCTACTCCATGATTTCCTGCTGGTTCCCCGAGAGCTGAGTGGCTCCTCCCCAGTCCTGGAGG |
| | AGACTCACCCAGCTCACCAGCAGGGAGCCAGCAGACCAGGGCCCCGGGATGCCCAGGCACACCCCGGCCGTCCCAGAGCAGTGCCCACACAGTGCGACGTCCCCCCCAACAGCCGCTTCGATTGCGCCCCTGACAAGGCCATCAC |
| | CCAGGAACAGTGCGAGGCCCGCGGCTGCTGCTACATCCCTGCAAAGCAGGGGCTGCAGGGAGCCCAGATGGGGCAGCCCTGGTGCTTCTTCCCACCCAGCTACCCCAGCTACAAGCTGGAGAACCTGAGCTCCTCTGAAATGGGC |
| | TACACGGCCACCCTGACCCGTACCACCCCCACCTTCTTCCCCAAGGACATCCTGACCCTGCGGCTGGACGTGATGATGGAGACTGAGAACCGCCTCCACTTCACGATCAAAGATCCAGCTAACAGGCGCTACGAGGTGCCCTTGG |
| | AGACCCCGCGTGTCCACAGCCGGGCACCGTCCCCACTCTACAGCGTGGAGTTCTCCGAGGAGCCCTTCGGGGTGATCGTGCACCGGCAGCTGGACGGCCGCGTGCTGCTGAACACGACGGTGGCGCCCCTGTTCTTTGCGGACCA |
| | GTTCCTTCAGCTGTCCACCTCGCTGCCCTCGCAGTATATCACAGGCCTCGCCGAGCACCTCAGTCCCCTGATGCTCAGCACCAGCTGGACCAGGATCACCCTGTGGAACCGGGACCTTGCGCCCACGCCCGGTGCGAACCTCTAC |
| | GGGTCTCACCCTTTCTACCTGGCGCTGGAGGACGGCGGGTCGGCACACGGGGTGTTCCTGCTAAACAGCAATGCCATGGATGTGGTCCTGCAGCCGAGCCCTGCCCTTAGCTGGAGGTCGACAGGTGGGATCCTGGATGTCTACA |
| | TCTTCCTGGGCCCAGAGCCCAAGAGCGTGGTGCAGCAGTACCTGGACGTTGTGGGATACCCGTTCATGCCGCCATACTGGGGCCTGGGCTTCCACCTGTGCCGCTGGGGCTACTCCTCCACCGCTATCACCCGCCAGGTGGTGGA |
| | GAACATGACCAGGGCCCACTTCCCCCTGGACGTCCAATGGAACGACCTGGACTACATGGACTCCCGGAGGGACTTCACGTTCAACAAGGATGGCTTCCGGGACTTCCCGGCCATGGTGCAGGAGCTGCACCAGGGCGGCCGGCGC |
| | TACATGATGATCGTGGATCCTGCCATCAGCAGCTCGGGCCCTGCCGGGAGCTACAGGCCCTACGACGAGGGTCTGCGGAGGGGGGTTTTCATCACCAACGAGACCGGCCAGCCGCTGATTGGGAAGGTATGGCCCGGGTCCACTG |
| | CCTTCCCCGACTTCACCAACCCCACAGCCCTGGCCTGGTGGGAGGACATGGTGGCTGAGTTCCATGACCAGGTGCCCTTCGACGGCATGTGGATTGACATGAACGAGCCTTCCAACTTCATCAGAGGCTCTGAGGACGGCTGCCC |
| | CAACAATGAGCTGGAGAACCCACCCTACGTGCCTGGGGTGGTTGGGGGGACCCTCCAGGCGGCCACCATCTGTGCCTCCAGCCACCAGTTTCTCTCCACACACTACAACCTGCACAACCTCTACGGCCTGACCGAAGCCATCGCC |
| | TCCCACAGGGCGCTGGTGAAGGCTCGGGGGACACGCCCATTTGTGATCTCCCGCTCGACCTTTGCTGGCCACGGCCGATACGCCGGCCACTGGACGGGGGACGTGTGGAGCTCCTGGGAGCAGCTCGCCTCCTCCGTGCCAGAAA |
| | TCCTGCAGTTTAACCTGCTGGGGGTGCCTCTGGTCGGGGCCGACGTCTGCGGCTTCCTGGGCAACACCTCAGAGGAGCTGTGTGTGCGCTGGACCCAGCTGGGGGCCTTCTACCCCTTCATGCGGAACCACAACAGCCTGCTCAG |
| | TCTGCCCCAGGAGCCGTACAGCTTCAGCGAGCCGGCCCAGCAGGCCATGAGGAAGGCCCTCACCCTGCGCTACGCACTCCTCCCCCACCTCTACACACTGTTCCACCAGGCCCACGTCGCGGGGGAGACCGTGGCCCGGCCCCTC |
| | TTCCTGGAGTTCCCCAAGGACTCTAGCACCTGGACTGTGGACCACCAGCTCCTGTGGGGGGAGGCCCTGCTCATCACCCCAGTGCTCCAGGCCGGGAAGGCCGAAGTGACTGGCTACTTCCCCTTGGGCACATGGTACGACCTGC |
| | AGACGGTGCCAATAGAGGCCCTTGGCAGCCTCCCACCCCCACCTGCAGCTCCCCGTGAGCCAGCCATCCACAGCGAGGGGCAGTGGGTGACGCTGCCGGCCCCCCTGGACACCATCAACGTCCACCTCCGGGCTGGGTACATCAT |
| | CCCCCTGCAGGGCCCTGGCCTCACAACCACAGAGTCCCGCCAGCAGCCCATGGCCCTGGCTGTGGCCCTGACCAAGGGTGGAGAGGCCCGAGGGGAGCTGTTCTGGGACGATGGAGAGAGCCTGGAAGTGCTGGAGCGAGGGGCC |
| | TACACACAGGTCATCTTCCTGGCCAGGAATAACACGATCGTGAATGAGCTGGTACGTGTGACCAGTGAGGGAGCTGGCCTGCAGCTGCAGAAGGTGACTGTCCTGGGCGTGGCCACGGCGCCCCAGCAGGTCCTCTCCAACGGTG |
| | TCCCTGTCTCCAACTTCACCTACAGCCCCGACACCAAGGTCCTGGACATCTGTGTCTCGCTGTTGATGGGAGAGCAGTTTCTCGTCAGCTGGTGTTAGCCGGGCGGAGTGTGTTAGTCTCTCCAGAGGGAGGCTGGTTCCCCAGG |
| | GAAGCAGAGCCTGTGTGCGGGCAGCAGCTGTGTGCGGGCCTGGGGGTTGTTAAGTGCAATTATTTTTAATAAAAGGGGCATTTGGAAAAAAAAAAAAAAGGTAGCAGTCGACAGATGAATTCTGCAGATCTGTGGCTTCTAGCTG |
| | CCCGGGTGGCATCCCTGTGACCCCTCCCCAGTGCCTCTCCTGGCCCTGGAAGTTGCCACTCCAGTGCCCACCAGCCTTGTCCTAATAAAATTAAGTTGCATCATTTTGTCTGACTAGGTGTCCTTCTATAATATTATGGGGTGGA |
| | GGGGGGTGGTATGGAGCAAGGGGCAAGTTGGGAAGACAACCTGAGTTGTTGGGATTCCAGGCATCGAGTAGATAAGTAGCATGGCGGGTTAATCATTAACTACAAGGAACCCCTAGTGATGGAGTTGGCCACTCCCTCTCTGCGC |
| | GCTCGCTCGCTCACTGAGGCCGGGCGACCAAAGGTCGCCCGACGCCCGGGCTTTGCCCGGGCGGCCTCAGTGAGCGAGCGAGCGCGCAG |
| 97 | >LSP\|LSP_ACTUS_ 101 |
| | TCTAGGAGTTAATTTTTAAAAAGCAGTCAAAAGTCCAAGTGCCCTTGCGAGCATTTACTCTCTCTGTTTGCTCTGGTTAATAATCTCAGGAGCACAAACATTCCTTACTAGTTCTAGGAGTTAATTTTTAAAAAGCAGTCAAAAG |
| | TCCAAGTGCCCTTGCGAGCATTTACTCTCTCTGTTTGCTCTGGTTAATAATCTCAGGAGCACAAACATTCCTTACTAGTTCTAGAGCGGCCGCCAGTGTGCTGGAATTCGGCTTTTTTAGGGCTGGAAGCTACCTTTGACATCAT |
| | TTCCTCTGCGAATGCATGTATAATTTCTACAGAACCTATTAGAAAGGATCACCCAGCCTCTGCTTTTGTACAACTTTCCCTTAAAAAACTGCCAATCCCACTGCTGTTTGGCCCAATAGTGAGAACTTTTTCCTGCTGCCTCTTG |
| | GTGCTTTTGCCTATGGCCCCTATTCTGCCTGCTGAAGACACTCTTGCCAGCATGGACTTAAACCCCTCCAGCTCTGACAATCCTCTTTCTCTTTTGTTTTACATGAAGGGTCTGGCAGCCAAAGCAATCACTCAAAGTTCAAACC |
| | TTATCATTTTTTGCTTTGTTCCTCTTGGCCTTGGTTTTGTACATCAGCTTTGAAAATACCATCCCAGGGTTAATGCTGGGGTTAATTTATAACTGAGAGTGCTCTAGTTCTGCAATACAGGACATGCTATAAAAATGGAAAGATG |
| | TTGCTTTCTGAGAGAT |
| 98 | >M2 LSP |
| | TCTAGGAGTTAATTTTTAAAAAGCAGTCAAAAGTCCAAGTGCCCTTGCGAGCATTTACTCTCTCTGTTTGCTCTGGTTAATAATCTCAGGAGCACAAACATTCCTTACTAGTTCTAGGAGTTAATTTTTAAAAAGCAGTCAAAAG |
| | TCCAAGTGCCCTTGCGAGCATTTACTCTCTCTGTTTGCTCTGGTTAATAATCTCAGGAGCACAAACATTCCTTACTAGTTCTAGAGCGGCCGCCAGTGTGCTGGAATTCGGCTTTTTTAGGGCTGGAAGCTACCTTTGACATCAT |
| | TTCCTCTGCGAATGCATGTATAATTTCTACAGAACCTATTAGAAAGGATCACCCAGCCTCTGCTTTTGTACAACTTTCCCTTAAAAAACTGCCAATCCCACTGCTGTTTGGCCCAATAGTGAGAACTTTTTCCTGCTGCCTCTTG |
| | GTGCTTTTGCCTATGGCCCCTATTCTGCCTGCTGAAGACACTCTTGCCAGCATGGACTTAAACCCCTCCAGCTCTGACAATCCTCTTTCTCTTTTGTTTTACATGAAGGGTCTGGCAGCCAAAGCAATCACTCAAAGTTCAAACC |
| | TTATCATTTTTTGCTTTGTTCCTCTTGGCCTTGGTTTTGTACATCAGCTGTGAAAATACCATCCCAGGGTATTTATAGCTGGGGTTAATTTATAACTGAGAGTGCTCTAGTTCTGCAATACAGGACATGCTATAAAAATGGAAAG |
| | ATGTTGCTTTCTGAGAGATCAGCTTACATGTG (SEQ ID NO: 437) |
| 99 | >M3 LSP |
| | TCTAGGAGTTAATTTTTAAAAAGCAGTCAAAAGTCCAAGTGCCCTTGCGAGCATTTACTCTCTCTGTTTGCTCTGGTTAATAATCTCAGGAGCACAAACATTCCTTACTAGTTCTAGGAGTTAATTTTTAAAAAGCAGTCAAAAG |
| | TCCAAGTGCCCTTGCGAGCATTTACTCTCTCTGTTTGCTCTGGTTAATAATCTCAGGAGCACAAACATTCCTTACTAGTTCTAGAGCGGCCGCCAGTGTGCTGGAATTCGGCTTTTTTAGGGCTGGAAGCTACCTTTGACATCAT |
| | TTCCTCTGCGAATGCATGTATAATTTCTACAGAACCTATTAGAAAGGATCACCCAGCCTCTGCTTTTGTACAACTTTCCCTTAAAAAACTGCCAATCCCACTGCTGTTTGGCCCAATAGTGAGAACTTTTTCCTGCTGCCTCTTG |
| | GTGCTTTTGCCTATGGCCCCTATTCTGCCTGCTGAAGACACTCTTGCCAGCATGGACTTAAACCCCTCCAGCTCTGACAATCCTCTTTCTCTTTTGTTTTACATGAAGGGTCTGGCAGCCAAAGCAATCACTCAAAGTTCAAACC |
| | TTATCATTTTTTGCTTTGTTCCTCTTGGCCTTGGTTTTGTACATCAGCTTTGAAAATACCATCCCAGGGTTAATGCTGGGGTTAATTTATAACTGAGAGTGCTCTAGTTCTGCAATACAGGACATGCTATAAAAATGGAAAGATG |
| | TTGCTTTCTGAGAGATCAGCTTACATGTG |
| 86 | > CRM_SP0412 |
| | AGGTTAATTTTTAAAAAGCAGTCAAAAGTCCAAGTGGCCCTTGGCAGCATTTACTCTCTCTGTTTGCTCTGGTTAATAATCTCAGGAGCACAAACATTCCCCCTGTTCAAACATGTCCTAATACTCTGTCTCTGCAAGGGTCATC |
| | AGTAGTTTTCCATCTTACTCAACATCCTCCCAGTG |
| 87 | > CRM_SP0239 |
| | CAGGCTTTCACTTTCTCGCCAACTTACAAGGCCTTTCTGTGTAAACAATACCTGAACCTTTACCCCGTTGCCCGGCAACGGCCAGGTCTGTGCCAAGTGTTTGAGGTTAATTTTTAAAAAGCAGTCAAAAGTCCAAGTGGCCCTT |
| | GGCAGCATTTACTCTCTCTGTTTGCTCTGGTTAATAATCTCAGGAGCACAAACATTCCGGCCCGGGAGGCGCCCTTTGGACCTTTTGCAATCCTGGCGCACTGAACCCTTGACCCCTGCCCTGCAGCCCCCGCAGCTTGCTGTTT |
| | GCCCACTCTATTTGCCCAGCCCCAGCCCTGGAGAGTCCTTTAGCAGGGCAAAGTGCAACATAGGCAGACCTTAAGGGATGACTCAGTAACAGATAAGCTTTGTGTGCCTGCA |
| 88 | > CRM_SP0265 (CRM_LVR_131_A1) |
| | AGGTTAATTTTTAAAAAGCAGTCAAAAGTCCAAGTGGCCCTTGGCAGCATTTACTCTCTCTGTTTGCTCTGGTTAATAATCTCAGGAGCACAAACATTCCTGTACCGGCCCGGGAGGCGCCCTTTGGACCTTTTGCAATCCTGGC |
| | GCACTGAACCCTTGACCCCTGCCCTGCAGCCCCCGCAGCTTGCTGTTTGCCCACTCTATTTGCCCAGCCCCAGCCCTGGAGAGTCCTTTAGCAGGGCAAAGTGCAACATAGGCAGACCTTAAGGGATGACTCAGTAACAGATAAG |
| | CTTTGTGTGCCTGCA |
| 89 | > CRM_SP0240 |
| | CAGGCTTTCACTTTCTCGCCAACTTACAAGGCCTTTCTGTGTAAACAATACCTGAACCTTTACCCCGTTGCCCGGCAACGGCCAGGTCTGTGCCAAGTGTTTG |
| 90 | > CRM_SP0246 |
| | AGGTTAATTTTTAAAAAGCAGTCAAAAGTCCAAGTGGCCCTTGGCAGCATTTACTCTCTCTGTTTGCTCTGGTTAATAATCTCAGGAGCACAAACATTCCGGCCCGGGAGGCGCCCTTTGGACCTTTTGCAATCCTGGCGCACTG |
| | AACCCTTGACCCCTGCCCTGCAGCCCCCGCAGCTTGCTGTTTGCCCACTCTATTTGCCCAGCCCCAG |
| 91 | > SP0412 |
| | AGGTTAATTTTTAAAAAGCAGTCAAAAGTCCAAGTGGCCCTTGGCAGCATTTACTCTCTCTGTTTGCTCTGGTTAATAATCTCAGGAGCACAAACATTCCCCCTGTTCAAACATGTCCTAATACTCTGTCTCTGCAAGGGTCATC |
| | AGTAGTTTTCCATCTTACTCAACATCCTCCCAGTGAGTCATATGTTTGCTCACTGAAGGTTACTAGTTAACAGGCATCCCTTAAACAGGATATAAAAGGACTTCAGCAGGACTGCTCGAAACATCCCACTCAGCCACC |
| 92 | > SP0422 |
| | AGGTTAATTTTTAAAAAGCAGTCAAAAGTCCAAGTGGCCCTTGGCAGCATTTACTCTCTCTGTTTGCTCTGGTTAATAATCTCAGGAGCACAAACATTCCCCCTGTTCAAACATGTCCTAATACTCTGTCTCTGCAAGGGTCATC |
| | AGTAGTTTTCCATCTTACTCAACATCCTCCCAGTGAGTCATATGTTTGCTCACTGAAGGTTACTAGTTAACAGGCATCCCTTAAACAGGATATAAAAGGACTTCAGCAGGACTGCTCGAAACATCCCACTTCAGATCGCCTGGAG |
| | ACGCCATCCACGCTGTTTTGACCTCCATAGAAGACACCGGGACCGATCCAGCCTCCGCGGCCGGGAACGGTGCATTGGAACGCGGATTCCCCGTGCCAAGAGTGACGTAAGTACCGCCTATAGACTCTATAGGCACACCCCTTTG |
| | GCTCTTATGCATGAACGGTGGAGGGCAGTGTAGTCTGAGCAGTACTCGTTGCTGCCGCGCGCGCCACCAGACATAATAGCTGACAGACTAACAGACTGTTCCTTTCCATGGGTCTTTTCTGCAGGCCACC |
| 93 | > SP0239 |
| | CAGGCTTTCACTTTCTCGCCAACTTACAAGGCCTTTCTGTGTAAACAATACCTGAACCTTTACCCCGTTGCCCGGCAACGGCCAGGTCTGTGCCAAGTGTTTGAGGTTAATTTTTAAAAAGCAGTCAAAAGTCCAAGTGGCCCTT |
| | GGCAGCATTTACTCTCTCTGTTTGCTCTGGTTAATAATCTCAGGAGCACAAACATTCCGGCCCGGGAGGCGCCCTTTGGACCTTTTGCAATCCTGGCGCACTGAACCCTTGACCCCTGCCCTGCAGCCCCCGCAGCTTGCTGTTT |
| | GCCCACTCTATTTGCCCAGCCCCAGCCCTGGAGAGTCCTTTAGCAGGGCAAAGTGCAACATAGGCAGACCTTAAGGGATGACTCAGTAACAGATAAGCTTTGTGTGCCTGCAGGGCATATAAAACAGGGGCAAGGCACAGACTCA |
| | TAGCAGAGCAATCACCACCAAGCCTGGAATAACTGCAGCCACC |
| 94 | > SP0265 (LVR_SP131_A1) |
| | AGGTTAATTTTTAAAAAGCAGTCAAAAGTCCAAGTGGCCCTTGGCAGCATTTACTCTCTCTGTTTGCTCTGGTTAATAATCTCAGGAGCACAAACATTCCTGTACCGGCCCGGGAGGCGCCCTTTGGACCTTTTGCAATCCTGGC |
| | GCACTGAACCCTTGACCCCTGCCCTGCAGCCCCCGCAGCTTGCTGTTTGCCCACTCTATTTGCCCAGCCCCAGCCCTGGAGAGTCCTTTAGCAGGGCAAAGTGCAACATAGGCAGACCTTAAGGGATGACTCAGTAACAGATAAG |
| | CTTTGTGTGCCTGCAGGGCATATAAAACAGGGGCAAGGCACAGACTCATAGCAGAGCAATCACCACCAAGCCTGGAATAACTGCAGCCACC |
| 95 | >SP0240 |
| | CAGGCTTTCACTTTCTCGCCAACTTACAAGGCCTTTCTGTGTAAACAATACCTGAACCTTTACCCCGTTGCCCGGCAACGGCCAGGTCTGTGCCAAGTGTTTGCCGATGACCTAATGATTCTGAGCTTGGCAAAGGTCTTATCTC |
| | CCAGCTCGCCCAGGCCCAGTGTTCCAGGAATGTGACCTTTGCTGCAGCAGCCGCTGGAGGGGGCAGAGGGGATGGGCTGGAGGTTGAGCAAACAGAGCAGCAGAAAAGGCAGTTCCTCTTCTCCAGTGCCCTCCTTCCCTGTCTC |
| | TGCCTCTCCCTCCCTTCCTCAGGCATCAGAGCGGAGACTTCAGGGAGACCAGAGCCCAGCTTGCCAGGCACTGAGCTAGAAGCCCTGCC |
| 96 | > SP0246 |
| | AGGTTAATTTTTAAAAAGCAGTCAAAAGTCCAAGTGGCCCTTGGCAGCATTTACTCTCTCTGTTTGCTCTGGTTAATAATCTCAGGAGCACAAACATTCCGGCCCGGGAGGCGCCCTTTGGACCTTTTGCAATCCTGGCGCACTG |
| | AACCCTTGACCCCTGCCCTGCAGCCCCCGCAGCTTGCTGTTTGCCCACTCTATTTGCCCAGCCCCAGGGGCATATAAAACAGGGGCAAGGCACAGACTCATAGCAGAGCAATCACCACCAAGCCTGGAATAACTGCAGCCACC |
| 144 | > SP0131 |
| | GGCCCGGGAGGCGCCCTTTGGACCTTTTGCAATCCTGGCGCACTGAACCCTTGACCCCTGCCCTGCAGCCCCCGCAGCTTGCTGTTTGCCCACTCTATTTGCCCAGCCCCAGCCCTGGAGAGTCCTTTAGCAGGGCAAAGTGCAA |
| | CATAGGCAGACCTTAAGGGATGACTCAGTAACAGATAAGCTTTGTGTGCCTGCAGGGCATATAAAACAGGGGCAAGGCACAGACTCATAGCAGAGCAATCACCACCAAGCCTGGAATAACTGCAGCCACC (SEQ ID NO: |
| | 144), |
| 145 | > CMV-IE 5′ UTR |
| | TCAGATCGCCTGGAGACGCCATCCACGCTGTTTTGACCTCCATAGAAGACACCGGGACCGATCCAGCCTCCGCGGCCGGGAACGGTGCATTGGAACGCGGATTCCCCGTGCCAAGAGTGACGTAAGTACCGCCTATAGACTCTAT |
| | AGGCACACCCCTTTGGCTCTTATGCATGAACGGTGGAGGGCAGTGTAGTCTGAGCAGTACTCGTTGCTGCCGCGCGCGCCACCAGACATAATAGCTGACAGACTAACAGACTGTTCCTTTCCATGGGTCTTTTCTGCAG (SEQ |
| | ID NO: 145), |
| 146 | > SP0265-UTR |
| | AGGTTAATTTTTAAAAAGCAGTCAAAAGTCCAAGTGGCCCTTGGCAGCATTTACTCTCTCTGTTTGCTCTGGTTAATAATCTCAGGAGCACAAACATTCCTGTACCGGCCCGGGAGGCGCCCTTTGGACCTTTTGCAATCCTGGC |
| | GCACTGAACCCTTGACCCCTGCCCTGCAGCCCCCGCAGCTTGCTGTTTGCCCACTCTATTTGCCCAGCCCCAGCCCTGGAGAGTCCTTTAGCAGGGCAAAGTGCAACATAGGCAGACCTTAAGGGATGACTCAGTAACAGATAAG |
| | CTTTGTGTGCCTGCAGGGCATATAAAACAGGGGCAAGGCACAGACTCATAGCAGAGTCAGATCGCCTGGAGACGCCATCCACGCTGTTTTGACCTCCATAGAAGACACCGGGACCGATCCAGCCTCCGCGGCCGGGAACGGTGCA |
| | TTGGAACGCGGATTCCCCGTGCCAAGAGTGACGTAAGTACCGCCTATAGACTCTATAGGCACACCCCTTTGGCTCTTATGCATGAACGGTGGAGGGCAGTGTAGTCTGAGCAGTACTCGTTGCTGCCGCGCGCGCCACCAGACAT |
| | AATAGCTGACAGACTAACAGACTGTTCCTTTCCATGGGTCTTTTCTGCAGGCCACC (SEQ ID NO: 147 |
| 147 | > SP0239-UTR |
| | CAGGCTTTCACTTTCTCGCCAACTTACAAGGCCTTTCTGTGTAAACAATACCTGAACCTTTACCCCGTTGCCCGGCAACGGCCAGGTCTGTGCCAAGTGTTTGAGGTTAATTTTTAAAAAGCAGTCAAAAGTCCAAGTGGCCCTT |
| | GGCAGCATTTACTCTCTCTGTTTGCTCTGGTTAATAATCTCAGGAGCACAAACATTCCGGCCCGGGAGGCGCCCTTTGGACCTTTTGCAATCCTGGCGCACTGAACCCTTGACCCCTGCCCTGCAGCCCCCGCAGCTTGCTGTTT |
| | GCCCACTCTATTTGCCCAGCCCCAGCCCTGGAGAGTCCTTTAGCAGGGCAAAGTGCAACATAGGCAGACCTTAAGGGATGACTCAGTAACAGATAAGCTTTGTGTGCCTGCAGGGCATATAAAACAGGGGCAAGGCACAGACTCA |
| | TAGCAGAGTCAGATCGCCTGGAGACGCCATCCACGCTGTTTTGACCTCCATAGAAGACACCGGGACCGATCCAGCCTCCGCGGCCGGGAACGGTGCATTGGAACGCGGATTCCCCGTGCCAAGAGTGACGTAAGTACCGCCTATA |
| | GACTCTATAGGCACACCCCTTTGGCTCTTATGCATGAACGGTGGAGGGCAGTGTAGTCTGAGCAGTACTCGTTGCTGCCGCGCGCGCCACCAGACATAATAGCTGACAGACTAACAGACTGTTCCTTTCCATGGGTCTTTTCTGC |
| | AGGCCACC (SEQ ID NO: 147), |
| 148 | > SP0240-UTR |
| | CAGGCTTTCACTTTCTCGCCAACTTACAAGGCCTTTCTGTGTAAACAATACCTGAACCTTTACCCCGTTGCCCGGCAACGGCCAGGTCTGTGCCAAGTGTTTGCCGATGACCTAATGATTCTGAGCTTGGCAAAGGTCTTATCTC |
| | CCAGCTCGCCCAGGCCCAGTGTTCCAGGAATGTGACCTTTGCTGCAGCAGCCGCTGGAGGGGGCAGAGGGGATGGGCTGGAGGTTGAGCAAACAGAGCAGCAGAAAAGGCAGTTCCTCTTCTCCAGTGCCCTCCTTCCCTGTCTC |
| | TGCCTCTCCCTCCCTTCCTCAGGCATCAGAGCGGAGACTTCAGGGAGACCAGAGCCCAGCTTGCCAGGCACTGTCAGATCGCCTGGAGACGCCATCCACGCTGTTTTGACCTCCATAGAAGACACCGGGACCGATCCAGCCTCCG |
| | CGGCCGGGAACGGTGCATTGGAACGCGGATTCCCCGTGCCAAGAGTGACGTAAGTACCGCCTATAGACTCTATAGGCACACCCCTTTGGCTCTTATGCATGAACGGTGGAGGGCAGTGTAGTCTGAGCAGTACTCGTTGCTGCCG |
| | CGCGCGCCACCAGACATAATAGCTGACAGACTAACAGACTGTTCCTTTCCATGGGTCTTTTCTGCAGGCCACC (SEQ ID NO: 148 |
| 149 | > SP0246-UTR |
| | AGGTTAATTTTTAAAAAGCAGTCAAAAGTCCAAGTGGCCCTTGGCAGCATTTACTCTCTCTGTTTGCTCTGGTTAATAATCTCAGGAGCACAAACATTCCGGCCCGGGAGGCGCCCTTTGGACCTTTTGCAATCCTGGCGCACTG |
| | AACCCTTGACCCCTGCCCTGCAGCCCCCGCAGCTTGCTGTTTGCCCACTCTATTTGCCCAGCCCCAGGGGCATATAAAACAGGGGCAAGGCACAGACTCATAGCAGAGTCAGATCGCCTGGAGACGCCATCCACGCTGTTTTGAC |
| | CTCCATAGAAGACACCGGGACCGATCCAGCCTCCGCGGCCGGGAACGGTGCATTGGAACGCGGATTCCCCGTGCCAAGAGTGACGTAAGTACCGCCTATAGACTCTATAGGCACACCCCTTTGGCTCTTATGCATGAACGGTGGA |
| | GGGCAGTGTAGTCTGAGCAGTACTCGTTGCTGCCGCGCGCGCCACCAGACATAATAGCTGACAGACTAACAGACTGTTCCTTTCCATGGGTCTTTTCTGCAGGCCACC (SEQ ID NO: 149), |
| 150 | > SP0131_A1-UTR |
| | GGCCCGGGAGGCGCCCTTTGGACCTTTTGCAATCCTGGCGCACTGAACCCTTGACCCCTGCCCTGCAGCCCCCGCAGCTTGCTGTTTGCCCACTCTATTTGCCCAGCCCCAGCCCTGGAGAGTCCTTTAGCAGGGCAAAGTGCAA |
| | CATAGGCAGACCTTAAGGGATGACTCAGTAACAGATAAGCTTTGTGTGCCTGCAGGGCATATAAAACAGGGGCAAGGCACAGACTCATAGCAGAGTCAGATCGCCTGGAGACGCCATCCACGCTGTTTTGACCTCCATAGAAGAC |
| | ACCGGGACCGATCCAGCCTCCGCGGCCGGGAACGGTGCATTGGAACGCGGATTCCCCGTGCCAAGAGTGACGTAAGTACCGCCTATAGACTCTATAGGCACACCCCTTTGGCTCTTATGCATGAACGGTGGAGGGCAGTGTAGTC |
| | TGAGCAGTACTCGTTGCTGCCGCGCGCGCCACCAGACATAATAGCTGACAGACTAACAGACTGTTCCTTTCCATGGGTCTTTTCTGCAGGCCACC (SEQ ID NO: 150), |
| 154 | >LVR412_askbioEU |
| | GCCATTCGCCATTCAGGCTGCGCAACTGTTGGGAAGGGCGATCGGTGCGGGCCTCTTCGCTATTACGCCAGCTGGCGAAAGGGGGATGTGCTGCAAGGCGATTAAGTTGGGTAACGCCAGGGTTTTCCCAGTCACGACGTTGTAA |
| | AACGACGGCCAGTGAATTCCTCGAGATTTAAATGACGTTGGCCACTCCCTCTCTGCGCGCTCGCTCGCTCACTGAGGCCGGGCGACCAAAGGTCGCCCGACGCCCGGGCTTTGCCCGGGCGGCCTCAGTGAGCGAGCGAGCGCGC |
| | AGAGAGGGAGTGGCCAACTCCATCACTAGGGGTTCCTGAGTTTAAACTTCGTCGAGGCCGCACGCGTAGGTTAATTTTTAAAAAGCAGTCAAAAGTCCAAGTGGCCCTTGGCAGCATTTACTCTCTCTGTTTGCTCTGGTTAATA |
| | ATCTCAGGAGCACAAACATTCCCCCTGTTCAAACATGTCCTAATACTCTGTCTCTGCAAGGGTCATCAGTAGTTTTCCATCTTACTCAACATCCTCCCAGTGAGTCATATGTTTGCTCACTGAAGGTTACTAGTTAACAGGCATC |
| | CCTTAAACAGGATATAAAAGGACTTCAGCAGGACTGCTCGAAACATCCCACTCAGCCACCATGGGAGTGAGGCACCCGCCCTGCTCCCACCGGCTCCTGGCCGTCTGCGCCCTCGTGTCCTTGGCAACCGCTGCACTCCTGGGGC |
| | ACATCCTACTCCATGATTTCCTGCTGGTTCCCCGAGAGCTGAGTGGCTCCTCCCCAGTCCTGGAGGAGACTCACCCAGCTCACCAGCAGGGAGCCAGCAGACCAGGGCCCCGGGATGCCCAGGCACACCCCGGCCGTCCCAGAGC |
| | AGTGCCCACACAGTGCGACGTCCCCCCCAACAGCCGCTTCGATTGCGCCCCTGACAAGGCCATCACCCAGGAACAGTGCGAGGCCCGCGGCTGCTGCTACATCCCTGCAAAGCAGGGGCTGCAGGGAGCCCAGATGGGGCAGCCC |
| | TGGTGCTTCTTCCCACCCAGCTACCCCAGCTACAAGCTGGAGAACCTGAGCTCCTCTGAAATGGGCTACACGGCCACCCTGACCCGTACCACCCCCACCTTCTTCCCCAAGGACATCCTGACCCTGCGGCTGGACGTGATGATGG |
| | AGACTGAGAACCGCCTCCACTTCACGATCAAAGATCCAGCTAACAGGCGCTACGAGGTGCCCTTGGAGACCCCGCGTGTCCACAGCCGGGCACCGTCCCCACTCTACAGCGTGGAGTTCTCCGAGGAGCCCTTCGGGGTGATCGT |
| | GCACCGGCAGCTGGACGGCCGCGTGCTGCTGAACACGACGGTGGCGCCCCTGTTCTTTGCGGACCAGTTCCTTCAGCTGTCCACCTCGCTGCCCTCGCAGTATATCACAGGCCTCGCCGAGCACCTCAGTCCCCTGATGCTCAGC |
| | ACCAGCTGGACCAGGATCACCCTGTGGAACCGGGACCTTGCGCCCACGCCCGGTGCGAACCTCTACGGGTCTCACCCTTTCTACCTGGCGCTGGAGGACGGCGGGTCGGCACACGGGGTGTTCCTGCTAAACAGCAATGCCATGG |
| | ATGTGGTCCTGCAGCCGAGCCCTGCCCTTAGCTGGAGGTCGACAGGTGGGATCCTGGATGTCTACATCTTCCTGGGCCCAGAGCCCAAGAGCGTGGTGCAGCAGTACCTGGACGTTGTGGGATACCCGTTCATGCCGCCATACTG |
| | GGGCCTGGGCTTCCACCTGTGCCGCTGGGGCTACTCCTCCACCGCTATCACCCGCCAGGTGGTGGAGAACATGACCAGGGCCCACTTCCCCCTGGACGTCCAATGGAACGACCTGGACTACATGGACTCCCGGAGGGACTTCACG |
| | TTCAACAAGGATGGCTTCCGGGACTTCCCGGCCATGGTGCAGGAGCTGCACCAGGGCGGCCGGCGCTACATGATGATCGTGGATCCTGCCATCAGCAGCTCGGGCCCTGCCGGGAGCTACAGGCCCTACGACGAGGGTCTGCGGA |
| | GGGGGGTTTTCATCACCAACGAGACCGGCCAGCCGCTGATTGGGAAGGTATGGCCCGGGTCCACTGCCTTCCCCGACTTCACCAACCCCACAGCCCTGGCCTGGTGGGAGGACATGGTGGCTGAGTTCCATGACCAGGTGCCCTT |
| | CGACGGCATGTGGATTGACATGAACGAGCCTTCCAACTTCATCAGAGGCTCTGAGGACGGCTGCCCCAACAATGAGCTGGAGAACCCACCCTACGTGCCTGGGGTGGTTGGGGGGACCCTCCAGGCGGCCACCATCTGTGCCTCC |
| | AGCCACCAGTTTCTCTCCACACACTACAACCTGCACAACCTCTACGGCCTGACCGAAGCCATCGCCTCCCACAGGGCGCTGGTGAAGGCTCGGGGGACACGCCCATTTGTGATCTCCCGCTCGACCTTTGCTGGCCACGGCCGAT |
| | ACGCCGGCCACTGGACGGGGGACGTGTGGAGCTCCTGGGAGCAGCTCGCCTCCTCCGTGCCAGAAATCCTGCAGTTTAACCTGCTGGGGGTGCCTCTGGTCGGGGCCGACGTCTGCGGCTTCCTGGGCAACACCTCAGAGGAGCT |
| | GTGTGTGCGCTGGACCCAGCTGGGGGCCTTCTACCCCTTCATGCGGAACCACAACAGCCTGCTCAGTCTGCCCCAGGAGCCGTACAGCTTCAGCGAGCCGGCCCAGCAGGCCATGAGGAAGGCCCTCACCCTGCGCTACGCACTC |
| | CTCCCCCACCTCTACACACTGTTCCACCAGGCCCACGTCGCGGGGGAGACCGTGGCCCGGCCCCTCTTCCTGGAGTTCCCCAAGGACTCTAGCACCTGGACTGTGGACCACCAGCTCCTGTGGGGGGAGGCCCTGCTCATCACCC |
| | CAGTGCTCCAGGCCGGGAAGGCCGAAGTGACTGGCTACTTCCCCTTGGGCACATGGTACGACCTGCAGACGGTGCCAATAGAGGCCCTTGGCAGCCTCCCACCCCCACCTGCAGCTCCCCGTGAGCCAGCCATCCACAGCGAGGG |
| | GCAGTGGGTGACGCTGCCGGCCCCCCTGGACACCATCAACGTCCACCTCCGGGCTGGGTACATCATCCCCCTGCAGGGCCCTGGCCTCACAACCACAGAGTCCCGCCAGCAGCCCATGGCCCTGGCTGTGGCCCTGACCAAGGGT |
| | GGAGAGGCCCGAGGGGAGCTGTTCTGGGACGATGGAGAGAGCCTGGAAGTGCTGGAGCGAGGGGCCTACACACAGGTCATCTTCCTGGCCAGGAATAACACGATCGTGAATGAGCTGGTACGTGTGACCAGTGAGGGAGCTGGCC |
| | TGCAGCTGCAGAAGGTGACTGTCCTGGGCGTGGCCACGGCGCCCCAGCAGGTCCTCTCCAACGGTGTCCCTGTCTCCAACTTCACCTACAGCCCCGACACCAAGGTCCTGGACATCTGTGTCTCGCTGTTGATGGGAGAGCAGTT |
| | TCTCGTCAGCTGGTGTTAGCCGGGCGGAGTGTGTTAGTCTCTCCAGAGGGAGGCTGGTTCCCCAGGGAAGCAGAGCCTGTGTGCGGGCAGCAGCTGTGTGCGGGCCTGGGGGTTGTTAAGTGCAATTATTTTTAATAAAAGGGGC |
| | ATTTGGAAAAAAAAAAAAAAGGTAGCAGTCGACAGATGAATTCTGCAGATCTGTGGCTTCTAGCTGCCCGGGTGGCATCCCTGTGACCCCTCCCCAGTGCCTCTCCTGGCCCTGGAAGTTGCCACTCCAGTGCCCACCAGCCTTG |
| | TCCTAATAAAATTAAGTTGCATCATTTTGTCTGACTAGGTGTCCTTCTATAATATTATGGGGTGGAGGGGGGTGGTATGGAGCAAGGGGCAAGTTGGGAAGACAACCTGAGTTGTTGGGATTCCAGGCATCGAGTAGATAAGTAG |
| | CATGGCGGGTTAATCATTAACTACACACGTGCGGACCGAGCGGCCTAAGCTCGCGAAGGAACCCCTAGTGATGGAGTTGGCCACTCCCTCTCTGCGCGCTCGCTCGCTCACTGAGGCCGGGCGACCAAAGGTCGCCCGACGCCCG |
| | GGCTTTGCCCGGGCGGCCTCAGTGAGCGAGCGAGCGCGCAGAGAGGGAGTGGCCAAGACGATTTAAATGACAAGCTTGGCGTAATCATGGTCATAGCTGTTTCCTGTGTGAAATTGTTATCCGCTCACAATTCCACACAACATAC |
| | GAGCCGGAAGCATAAAGTGTAAAGCCTGGGGTGCCTAATGAGTGAGCTAACTCACATTAATTGCGTTGCGCTCACTGCCCGCTTTCCAGTCGGGAAACCTGTCGTGCCAGCTGCATTAATGAATCGGCCAACGCGCGGGGAGAGG |
| | CGGTTTGCGTATTGGGCGCTCTTCCGCTTCCTCGCTCACTGACTCGCTGCGCTCGGTCGTTCGGCTGCGGCGAGCGGTATCAGCTCACTCAAAGGCGGTAATACGGTTATCCACAGAATCAGGGGATAACGCAGGAAAGAACATG |
| | TGAGCAAAAGGCCAGCAAAAGGCCAGGAACCGTAAAAAGGCCGCGTTGCTGGCGTTTTTCCATAGGCTCCGCCCCCCTGACGAGCATCACAAAAATCGACGCTCAAGTCAGAGGTGGCGAAACCCGACAGGACTATAAAGATACC |
| | AGGCGTTTCCCCCTGGAAGCTCCCTCGTGCGCTCTCCTGTTCCGACCCTGCCGCTTACCGGATACCTGTCCGCCTTTCTCCCTTCGGGAAGCGTGGCGCTTTCTCATAGCTCACGCTGTAGGTATCTCAGTTCGGTGTAGGTCGT |
| | TCGCTCCAAGCTGGGCTGTGTGCACGAACCCCCCGTTCAGCCCGACCGCTGCGCCTTATCCGGTAACTATCGTCTTGAGTCCAACCCGGTAAGACACGACTTATCGCCACTGGCAGCAGCCACTGGTAACAGGATTAGCAGAGCG |
| | AGGTATGTAGGCGGTGCTACAGAGTTCTTGAAGTGGTGGCCTAACTACGGCTACACTAGAAGAACAGTATTTGGTATCTGCGCTCTGCTGAAGCCAGTTACCTTCGGAAAAAGAGTTGGTAGCTCTTGATCCGGCAAACAAACCA |
| | CCGCTGGTAGCGGTGGTTTTTTTGTTTGCAAGCAGCAGATTACGCGCAGAAAAAAAGGATCTCAAGAAGATCCTTTGATCTTTTCTACGGGGTCTGACGCTCAGTGGAACGAAAACTCACGTTAAGGGATTTTGGTCATGAGATT |
| | ATCAAAAAGGATCTTCACCTAGATCCTTTTAAATTAAAAATGAAGTTTTAAATCAATCTAAAGTATATATGAGTAAACTTGGTCTGACAGTTAGAAAAACTCATCGAGCATCAAATGAAACTGCAATTTATTCATATCAGGATTA |
| | TCAATACCATATTTTTGAAAAAGCCGTTTCTGTAATGAAGGAGAAAACTCACCGAGGCAGTTCCATAGGATGGCAAGATCCTGGTATCGGTCTGCGATTCCGACTCGTCCAACATCAATACAACCTATTAATTTCCCCTCGTCAA |
| | AAATAAGGTTATCAAGTGAGAAATCACCATGAGTGACGACTGAATCCGGTGAGAATGGCAAAAGTTTATGCATTTCTTTCCAGACTTGTTCAACAGGCCAGCCATTACGCTCGTCATCAAAATCACTCGCATCAACCAAACCGTT |
| | ATTCATTCGTGATTGCGCCTGAGCGAGACGAAATACGCGATCGCTGTTAAAAGGACAATTACAAACAGGAATCGAATGCAACCGGCGCAGGAACACTGCCAGCGCATCAACAATATTTTCACCTGAATCAGGATATTCTTCTAAT |
| | ACCTGGAATGCTGTTTTTCCGGGGATCGCAGTGGTGAGTAACCATGCATCATCAGGAGTACGGATAAAATGCTTGATGGTCGGAAGAGGCATAAATTCCGTCAGCCAGTTTAGTCTGACCATCTCATCTGTAACATCATTGGCAA |
| | CGCTACCTTTGCCATGTTTCAGAAACAACTCTGGCGCATCGGGCTTCCCATACAAGCGATAGATTGTCGCACCTGATTGCCCGACATTATCGCGAGCCCATTTATACCCATATAAATCAGCATCCATGTTGGAATTTAATCGCGG |
| | CCTCGACGTTTCCCGTTGAATATGGCTCATACTCTTCCTTTTTCAATATTATTGAAGCATTTATCAGGGTTATTGTCTCATGAGCGGATACATATTTGAATGTATTTAGAAAAATAAACAAATAGGGGTTCCGCGCACATTTCCC |
| | CGAAAAGTGCCACCTGACGTCTAAGAAACCATTATTATCATGACATTAACCTATAAAAATAGGCGTATCACGAGGCCCTTTCGTCTCGCGCGTTTCGGTGATGACGGTGAAAACCTCTGACACATGCAGCTCCCGGAGACGGTCA |
| | CAGCTTGTCTGTAAGCGGATGCCGGGAGCAGACAAGCCCGTCAGGGCGCGTCAGCGGGTGTTGGCGGGTGTCGGGGCTGGCTTAACTATGCGGCATCAGAGCAGATTGTACTGAGAGTGCACCATATGCGGTGTGAAATACCGCA |
| | CAGATGCGTAAGGAGAAAATACCGCATCAGGC |
| 158 | >LVR422 Stuffer |
| | GCCATTCGCCATTCAGGCTGCGCAACTGTTGGGAAGGGCGATCGGTGCGGGCCTCTTCGCTATTACGCCAGCTGGCGAAAGGGGGATGTGCTGCAAGGCGATTAAGTTGGGTAACGCCAGGGTTTTCCCAGTCACGACGTTGTAA |
| | AACGACGGCCAGTGAATTCCTCGAGATTTAAATGACGTTGGCCACTCCCTCTCTGCGCGCTCGCTCGCTCACTGAGGCCGGGCGACCAAAGGTCGCCCGACGCCCGGGCTTTGCCCGGGCGGCCTCAGTGAGCGAGCGAGCGCGC |
| | AGAGAGGGAGTGGCCAACTCCATCACTAGGGGTTCCTGAGTTTAAACTTCGTCGAGGCCGCACGCGTAGGTTAATTTTTAAAAAGCAGTCAAAAGTCCAAGTGGCCCTTGGCAGCATTTACTCTCTCTGTTTGCTCTGGTTAATA |
| | ATCTCAGGAGCACAAACATTCCCCCTGTTCAAACATGTCCTAATACTCTGTCTCTGCAAGGGTCATCAGTAGTTTTCCATCTTACTCAACATCCTCCCAGTGAGTCATATGTTTGCTCACTGAAGGTTACTAGTTAACAGGCATC |
| | CCTTAAACAGGATATAAAAGGACTTCAGCAGGACTGCTCGAAACATCCCACTTCAGATCGCCTGGAGACGCCATCCACGCTGTTTTGACCTCCATAGAAGACACCGGGACCGATCCAGCCTCCGCGGCCGGGAACGGTGCATTGG |
| | AACGCGGATTCCCCGTGCCAAGAGTGACGTAAGTACCGCCTATAGACTCTATAGGCACACCCCTTTGGCTCTTATGCATGAACGGTGGAGGGCAGTGTAGTCTGAGCAGTACTCGTTGCTGCCGCGCGCGCCACCAGACATAATA |
| | GCTGACAGACTAACAGACTGTTCCTTTCCATGGGTCTTTTCTGCAGGCCACCATGGGAGTGAGGCACCCGCCCTGCTCCCACCGGCTCCTGGCCGTCTGCGCCCTCGTGTCCTTGGCAACCGCTGCACTCCTGGGGCACATCCTA |
| | CTCCATGATTTCCTGCTGGTTCCCCGAGAGCTGAGTGGCTCCTCCCCAGTCCTGGAGGAGACTCACCCAGCTCACCAGCAGGGAGCCAGCAGACCAGGGCCCCGGGATGCCCAGGCACACCCCGGCCGTCCCAGAGCAGTGCCCA |
| | CACAGTGCGACGTCCCCCCCAACAGCCGCTTCGATTGCGCCCCTGACAAGGCCATCACCCAGGAACAGTGCGAGGCCCGCGGCTGCTGCTACATCCCTGCAAAGCAGGGGCTGCAGGGAGCCCAGATGGGGCAGCCCTGGTGCTT |
| | CTTCCCACCCAGCTACCCCAGCTACAAGCTGGAGAACCTGAGCTCCTCTGAAATGGGCTACACGGCCACCCTGACCCGTACCACCCCCACCTTCTTCCCCAAGGACATCCTGACCCTGCGGCTGGACGTGATGATGGAGACTGAG |
| | AACCGCCTCCACTTCACGATCAAAGATCCAGCTAACAGGCGCTACGAGGTGCCCTTGGAGACCCCGCGTGTCCACAGCCGGGCACCGTCCCCACTCTACAGCGTGGAGTTCTCCGAGGAGCCCTTCGGGGTGATCGTGCACCGGC |
| | AGCTGGACGGCCGCGTGCTGCTGAACACGACGGTGGCGCCCCTGTTCTTTGCGGACCAGTTCCTTCAGCTGTCCACCTCGCTGCCCTCGCAGTATATCACAGGCCTCGCCGAGCACCTCAGTCCCCTGATGCTCAGCACCAGCTG |
| | GACCAGGATCACCCTGTGGAACCGGGACCTTGCGCCCACGCCCGGTGCGAACCTCTACGGGTCTCACCCTTTCTACCTGGCGCTGGAGGACGGCGGGTCGGCACACGGGGTGTTCCTGCTAAACAGCAATGCCATGGATGTGGTC |
| | CTGCAGCCGAGCCCTGCCCTTAGCTGGAGGTCGACAGGTGGGATCCTGGATGTCTACATCTTCCTGGGCCCAGAGCCCAAGAGCGTGGTGCAGCAGTACCTGGACGTTGTGGGATACCCGTTCATGCCGCCATACTGGGGCCTGG |
| | GCTTCCACCTGTGCCGCTGGGGCTACTCCTCCACCGCTATCACCCGCCAGGTGGTGGAGAACATGACCAGGGCCCACTTCCCCCTGGACGTCCAATGGAACGACCTGGACTACATGGACTCCCGGAGGGACTTCACGTTCAACAA |
| | GGATGGCTTCCGGGACTTCCCGGCCATGGTGCAGGAGCTGCACCAGGGCGGCCGGCGCTACATGATGATCGTGGATCCTGCCATCAGCAGCTCGGGCCCTGCCGGGAGCTACAGGCCCTACGACGAGGGTCTGCGGAGGGGGGTT |
| | TTCATCACCAACGAGACCGGCCAGCCGCTGATTGGGAAGGTATGGCCCGGGTCCACTGCCTTCCCCGACTTCACCAACCCCACAGCCCTGGCCTGGTGGGAGGACATGGTGGCTGAGTTCCATGACCAGGTGCCCTTCGACGGCA |
| | TGTGGATTGACATGAACGAGCCTTCCAACTTCATCAGAGGCTCTGAGGACGGCTGCCCCAACAATGAGCTGGAGAACCCACCCTACGTGCCTGGGGTGGTTGGGGGGACCCTCCAGGCGGCCACCATCTGTGCCTCCAGCCACCA |
| | GTTTCTCTCCACACACTACAACCTGCACAACCTCTACGGCCTGACCGAAGCCATCGCCTCCCACAGGGCGCTGGTGAAGGCTCGGGGGACACGCCCATTTGTGATCTCCCGCTCGACCTTTGCTGGCCACGGCCGATACGCCGGC |
| | CACTGGACGGGGGACGTGTGGAGCTCCTGGGAGCAGCTCGCCTCCTCCGTGCCAGAAATCCTGCAGTTTAACCTGCTGGGGGTGCCTCTGGTCGGGGCCGACGTCTGCGGCTTCCTGGGCAACACCTCAGAGGAGCTGTGTGTGC |
| | GCTGGACCCAGCTGGGGGCCTTCTACCCCTTCATGCGGAACCACAACAGCCTGCTCAGTCTGCCCCAGGAGCCGTACAGCTTCAGCGAGCCGGCCCAGCAGGCCATGAGGAAGGCCCTCACCCTGCGCTACGCACTCCTCCCCCA |
| | CCTCTACACACTGTTCCACCAGGCCCACGTCGCGGGGGAGACCGTGGCCCGGCCCCTCTTCCTGGAGTTCCCCAAGGACTCTAGCACCTGGACTGTGGACCACCAGCTCCTGTGGGGGGAGGCCCTGCTCATCACCCCAGTGCTC |
| | CAGGCCGGGAAGGCCGAAGTGACTGGCTACTTCCCCTTGGGCACATGGTACGACCTGCAGACGGTGCCAATAGAGGCCCTTGGCAGCCTCCCACCCCCACCTGCAGCTCCCCGTGAGCCAGCCATCCACAGCGAGGGGCAGTGGG |
| | TGACGCTGCCGGCCCCCCTGGACACCATCAACGTCCACCTCCGGGCTGGGTACATCATCCCCCTGCAGGGCCCTGGCCTCACAACCACAGAGTCCCGCCAGCAGCCCATGGCCCTGGCTGTGGCCCTGACCAAGGGTGGAGAGGC |
| | CCGAGGGGAGCTGTTCTGGGACGATGGAGAGAGCCTGGAAGTGCTGGAGCGAGGGGCCTACACACAGGTCATCTTCCTGGCCAGGAATAACACGATCGTGAATGAGCTGGTACGTGTGACCAGTGAGGGAGCTGGCCTGCAGCTG |
| | CAGAAGGTGACTGTCCTGGGCGTGGCCACGGCGCCCCAGCAGGTCCTCTCCAACGGTGTCCCTGTCTCCAACTTCACCTACAGCCCCGACACCAAGGTCCTGGACATCTGTGTCTCGCTGTTGATGGGAGAGCAGTTTCTCGTCA |
| | GCTGGTGTTAGCGAGCGGCCGCTCTTAGTAGCAGTATCGATCCCAGCCCACTTTTCCCCAATACGACTACGAGATCTGTGGCTTCTAGCTGCCCGGGTGGCATCCCTGTGACCCCTCCCCAGTGCCTCTCCTGGCCCTGGAAGTT |
| | GCCACTCCAGTGCCCACCAGCCTTGTCCTAATAAAATTAAGTTGCATCATTTTGTCTGACTAGGTGTCCTTCTATAATATTATGGGGTGGAGGGGGGTGGTATGGAGCAAGGGGCAAGTTGGGGTCCTTCAACGTCGAACTGTAG |
| | CACTCTGGATAGCTAGCTAGCGTTTGTAGATAGTTTCAAGGATAGCAACCAACAACACGATAGTTTAGAAATTGTTCTAGATCTTCTGCTACTACTCGAGAGATAGTTGACTTCTAGAAGACTCTGGATAGAGAGCTTCCTGTGG |
| | TTTCTATTTCAACACTTCGAGCGATTTAGATAGAGGCGTCAATTGAGAACAAAAACTGGACACCTGTTTCTAGAACACTAGTGCTAGTCTTCTCAAGGCTTGATACGTCCTGCCACTCACACACAAAAAACCAACACACAGATTA |
| | ATGAAAATAAAGATCTTTTATTAGAGAGCGAGTGGATAGTTTAGAGTCGCTTGAGACTTATCCTGTGTCCAACTAGCCAAGAGTAGAGAGAGAGTGACTAGGTGGATCGAGAGATCGTCGTCTATTTGACTGCTAGCCTGTGTTC |
| | TCGTCGTAGTCCAAATCTTCAATACTCTGGCGACTAGTAACTTGAATCTGTGTATCTAACACGACAAGGCTACTCCTTTGAGTTTCTAGTGATAAGTGCGACTGGATCTAGCTAGTTGAGTTTCTAGAAACTACGTCCAAAGCTA |
| | CTAGCACTACACGTGCGGACCGAGCGGCCTAAGCTCGCGAAGGAACCCCTAGTGATGGAGTTGGCCACTCCCTCTCTGCGCGCTCGCTCGCTCACTGAGGCCGGGCGACCAAAGGTCGCCCGACGCCCGGGCTTTGCCCGGGCGG |
| | CCTCAGTGAGCGAGCGAGCGCGCAGAGAGGGAGTGGCCAAGACGATTTAAATGACAAGCTTGGCGTAATCATGGTCATAGCTGTTTCCTGTGTGAAATTGTTATCCGCTCACAATTCCACACAACATACGAGCCGGAAGCATAAA |
| | GTGTAAAGCCTGGGGTGCCTAATGAGTGAGCTAACTCACATTAATTGCGTTGCGCTCACTGCCCGCTTTCCAGTCGGGAAACCTGTCGTGCCAGCTGCATTAATGAATCGGCCAACGCGCGGGGAGAGGCGGTTTGCGTATTGGG |
| | CGCTCTTCCGCTTCCTCGCTCACTGACTCGCTGCGCTCGGTCGTTCGGCTGCGGCGAGCGGTATCAGCTCACTCAAAGGCGGTAATACGGTTATCCACAGAATCAGGGGATAACGCAGGAAAGAACATGTGAGCAAAAGGCCAGC |
| | AAAAGGCCAGGAACCGTAAAAAGGCCGCGTTGCTGGCGTTTTTCCATAGGCTCCGCCCCCCTGACGAGCATCACAAAAATCGACGCTCAAGTCAGAGGTGGCGAAACCCGACAGGACTATAAAGATACCAGGCGTTTCCCCCTGG |
| | AAGCTCCCTCGTGCGCTCTCCTGTTCCGACCCTGCCGCTTACCGGATACCTGTCCGCCTTTCTCCCTTCGGGAAGCGTGGCGCTTTCTCATAGCTCACGCTGTAGGTATCTCAGTTCGGTGTAGGTCGTTCGCTCCAAGCTGGGC |
| | TGTGTGCACGAACCCCCCGTTCAGCCCGACCGCTGCGCCTTATCCGGTAACTATCGTCTTGAGTCCAACCCGGTAAGACACGACTTATCGCCACTGGCAGCAGCCACTGGTAACAGGATTAGCAGAGCGAGGTATGTAGGCGGTG |
| | CTACAGAGTTCTTGAAGTGGTGGCCTAACTACGGCTACACTAGAAGAACAGTATTTGGTATCTGCGCTCTGCTGAAGCCAGTTACCTTCGGAAAAAGAGTTGGTAGCTCTTGATCCGGCAAACAAACCACCGCTGGTAGCGGTGG |
| | TTTTTTTGTTTGCAAGCAGCAGATTACGCGCAGAAAAAAAGGATCTCAAGAAGATCCTTTGATCTTTTCTACGGGGTCTGACGCTCAGTGGAACGAAAACTCACGTTAAGGGATTTTGGTCATGAGATTATCAAAAAGGATCTTC |
| | ACCTAGATCCTTTTAAATTAAAAATGAAGTTTTAAATCAATCTAAAGTATATATGAGTAAACTTGGTCTGACAGTTAGAAAAACTCATCGAGCATCAAATGAAACTGCAATTTATTCATATCAGGATTATCAATACCATATTTTT |
| | GAAAAAGCCGTTTCTGTAATGAAGGAGAAAACTCACCGAGGCAGTTCCATAGGATGGCAAGATCCTGGTATCGGTCTGCGATTCCGACTCGTCCAACATCAATACAACCTATTAATTTCCCCTCGTCAAAAATAAGGTTATCAAG |
| | TGAGAAATCACCATGAGTGACGACTGAATCCGGTGAGAATGGCAAAAGTTTATGCATTTCTTTCCAGACTTGTTCAACAGGCCAGCCATTACGCTCGTCATCAAAATCACTCGCATCAACCAAACCGTTATTCATTCGTGATTGC |
| | GCCTGAGCGAGACGAAATACGCGATCGCTGTTAAAAGGACAATTACAAACAGGAATCGAATGCAACCGGCGCAGGAACACTGCCAGCGCATCAACAATATTTTCACCTGAATCAGGATATTCTTCTAATACCTGGAATGCTGTTT |
| | TTCCGGGGATCGCAGTGGTGAGTAACCATGCATCATCAGGAGTACGGATAAAATGCTTGATGGTCGGAAGAGGCATAAATTCCGTCAGCCAGTTTAGTCTGACCATCTCATCTGTAACATCATTGGCAACGCTACCTTTGCCATG |
| | TTTCAGAAACAACTCTGGCGCATCGGGCTTCCCATACAAGCGATAGATTGTCGCACCTGATTGCCCGACATTATCGCGAGCCCATTTATACCCATATAAATCAGCATCCATGTTGGAATTTAATCGCGGCCTCGACGTTTCCCGT |
| | TGAATATGGCTCATACTCTTCCTTTTTCAATATTATTGAAGCATTTATCAGGGTTATTGTCTCATGAGCGGATACATATTTGAATGTATTTAGAAAAATAAACAAATAGGGGTTCCGCGCACATTTCCCCGAAAAGTGCCACCTG |
| | ACGTCTAAGAAACCATTATTATCATGACATTAACCTATAAAAATAGGCGTATCACGAGGCCCTTTCGTCTCGCGCGTTTCGGTGATGACGGTGAAAACCTCTGACACATGCAGCTCCCGGAGACGGTCACAGCTTGTCTGTAAGC |
| | GGATGCCGGGAGCAGACAAGCCCGTCAGGGCGCGTCAGCGGGTGTTGGCGGGTGTCGGGGCTGGCTTAACTATGCGGCATCAGAGCAGATTGTACTGAGAGTGCACCATATGCGGTGTGAAATACCGCACAGATGCGTAAGGAGA |
| | AAATACCGCATCAGGC |
| | >LVRSP0412 insertion |
| | GGTACCGAGCTCGGATCCACTAGTAACGGCCGCCAGTGTGCTGGAAT |
| 106 | >mod GAA (H199R, R223H) |
| | MGVRHPPCSHRLLAVCALVSLATAALLGHILLHDFLLVPRELSGSSPVLEETHPAHQQGASRPGPRDAQAHPGRPRAVPTQCDVPPNSRFDCAPDKAITQEQCEARGCCYIPAKQGLQGAQMGQPWCFFPPSYPSYKLENLSSSE |
| | MGYTATLTRTTPTFFPKDILTLRLDVMMETENRLHFTIKDPANRRYEVPLETPRVHSRAPSPLYSVEFSEEPFGVIVHRQLDGRVLLNTTVAPLFFADQFLQLSTSLPSQYITGLAEHLSPLMLSTSWTRITLWNRDLAPTPGAN |
| | LYGSHPFYLALEDGGSAHGVFLLNSNAMDVVLQPSPALSWRSTGGILDVYIFLGPEPKSVVQQYLDVVGYPFMPPYWGLGFHLCRWGYSSTAITRQVVENMTRAHFPLDVQWNDLDYMDSRRDFTFNKDGFRDFPAMVQELHQGG |
| | RRYMMIVDPAISSSGPAGSYRPYDEGLRRGVFITNETGQPLIGKVWPGSTAFPDFTNPTALAWWEDMVAEFHDQVPFDGMWIDMNEPSNFIRGSEDGCPNNELENPPYVPGVVGGTLQAATICASSHQFLSTHYNLHNLYGLTEA |
| | IASHRALVKARGTRPFVISRSTFAGHGRYAGHWTGDVWSSWEQLASSVPEILQFNLLGVPLVGADVCGFLGNTSEELCVRWTQLGAFYPFMRNHNSLLSLPQEPYSFSEPAQQAMRKALTLRYALLPHLYTLFHQAHVAGETVAR |
| | PLFLEFPKDSSTWTVDHQLLWGEALLITPVLQAGKAEVTGYFPLGTWYDLQTVPIEALGSLPPPPAAPREPAIHSEGQWVTLPAPLDTINVHLRAGYIIPLQGPGLTTTESRQQPMALAVALTKGGEARGELEWDDGESLEVLER |
| | GAYTQVIFLARNNTIVNELVRVTSEGAGLQLQKVTVLGVATAPQQVLSNGVPVSNFTYSPDTKVLDICVSLLMGEQFLVSWC |
| 107 | >mod GAA (H199R, H203L, R223H) |
| | MGVRHPPCSHRLLAVCALVSLATAALLGHILLHDFLLVPRELSGSSPVLEETHPAHQQGASRPGPRDAQAHPGRPRAVPTQCDVPPNSRFDCAPDKAITQEQCEARGCCYIPAKQGLQGAQMGQPWCFFPPSYPSYKLENLSSSE |
| | MGYTATLTRTTPTFFPKDILTLRLDVMMETENRLHFTIKDPANRRYEVPLETPRVLSRAPSPLYSVEFSEEPFGVIVHRQLDGRVLLNTTVAPLFFADQFLQLSTSLPSQYITGLAEHLSPLMLSTSWTRITLWNRDLAPTPGAN |
| | LYGSHPFYLALEDGGSAHGVFLLNSNAMDVVLQPSPALSWRSTGGILDVYIFLGPEPKSVVQQYLDVVGYPFMPPYWGLGFHLCRWGYSSTAITRQVVENMTRAHFPLDVQWNDLDYMDSRRDFTFNKDGFRDFPAMVQELHQGG |
| | RRYMMIVDPAISSSGPAGSYRPYDEGLRRGVFITNETGQPLIGKVWPGSTAFPDFTNPTALAWWEDMVAEFHDQVPFDGMWIDMNEPSNFIRGSEDGCPNNELENPPYVPGVVGGTLQAATICASSHQFLSTHYNLHNLYGLTEA |
| | IASHRALVKARGTRPFVISRSTFAGHGRYAGHWTGDVWSSWEQLASSVPEILQFNLLGVPLVGADVCGFLGNTSEELCVRWTQLGAFYPFMRNHNSLLSLPQEPYSFSEPAQQAMRKALTLRYALLPHLYTLFHQAHVAGETVAR |
| | PLFLEFPKDSSTWTVDHQLLWGEALLITPVLQAGKAEVTGYFPLGTWYDLQTVPIEALGSLPPPPAAPREPAIHSEGQWVTLPAPLDTINVHLRAGYIIPLQGPGLTTTESRQQPMALAVALTKGGEARGELFWDDGESLEVLER |
| | GAYTQVIFLARNNTIVNELVRVTSEGAGLQLQKVTVLGVATAPQQVLSNGVPVSNFTYSPDTKVLDICVSLLMGEQFLVSWC |
| 108 | >mod GAA w/201 signal peptide |
| | MEFGLSWVFLVALLKGVQCEGHILLHDFLLVPRELSGSSPVLEETHPAHQQGASRPGPRDAQAHPGRPRAVPTQCDVPPNSRFDCAPDKAITQEQCEARGCCYIPAKQGLQGAQMGQPWCFFPPSYPSYKLENLSSSEMGYTATL |
| | TRTTPTFFPKDILTLRLDVMMETENRLHFTIKDPANRRYEVPLETPRVHSRAPSPLYSVEFSEEPFGVIVHRQLDGRVLLNTTVAPLFFADQFLQLSTSLPSQYITGLAEHLSPLMLSTSWTRITLWNRDLAPTPGANLYGSHPF |
| | YLALEDGGSAHGVFLLNSNAMDVVLQPSPALSWRSTGGILDVYIFLGPEPKSVVQQYLDVVGYPFMPPYWGLGFHLCRWGYSSTAITRQVVENMTRAHFPLDVQWNDLDYMDSRRDFTFNKDGFRDFPAMVQELHQGGRRYMMIV |
| | DPAISSSGPAGSYRPYDEGLRRGVFITNETGQPLIGKVWPGSTAFPDFTNPTALAWWEDMVAEFHDQVPFDGMWIDMNEPSNFIRGSEDGCPNNELENPPYVPGVVGGTLQAATICASSHQFLSTHYNLHNLYGLTEAIASHRAL |
| | VKARGTRPFVISRSTFAGHGRYAGHWTGDVWSSWEQLASSVPEILQFNLLGVPLVGADVCGFLGNTSEELCVRWTQLGAFYPFMRNHNSLLSLPQEPYSESEPAQQAMRKALTLRYALLPHLYTLFHQAHVAGETVARPLFLEFP |
| | KDSSTWTVDHQLLWGEALLITPVLQAGKAEVTGYFPLGTWYDLQTVPIEALGSLPPPPAAPREPAIHSEGQWVTLPAPLDTINVHLRAGYIIPLQGPGLTTTESRQQPMALAVALTKGGEARGELFWDDGESLEVLERGAYTQVI |
| | FLARNNTIVNELVRVTSEGAGLQLQKVTVLGVATAPQQVLSNGVPVSNFTYSPDTKVLDICVSLLMGEQFLVSWC |
| 109 | >mod GAA w/wt IL2 signal peptide |
| | MYRMQLLSCIALSLALVTNSGHILLHDFLLVPRELSGSSPVLEETHPAHQQGASRPGPRDAQAHPGRPRAVPTQCDVPPNSRFDCAPDKAITQEQCEARGCCYIPAKQGLQGAQMGQPWCFFPPSYPSYKLENLSSSEMGYTATL |
| | TRTTPTFFPKDILTLRLDVMMETENRLHFTIKDPANRRYEVPLETPRVHSRAPSPLYSVEFSEEPFGVIVHRQLDGRVLLNTTVAPLFFADQFLQLSTSLPSQYITGLAEHLSPLMLSTSWTRITLWNRDLAPTPGANLYGSHPF |
| | YLALEDGGSAHGVFLLNSNAMDVVLQPSPALSWRSTGGILDVYIFLGPEPKSVVQQYLDVVGYPFMPPYWGLGFHLCRWGYSSTAITRQVVENMTRAHFPLDVQWNDLDYMDSRRDFTFNKDGFRDFPAMVQELHQGGRRYMMIV |
| | DPAISSSGPAGSYRPYDEGLRRGVFITNETGQPLIGKVWPGSTAFPDFTNPTALAWWEDMVAEFHDQVPFDGMWIDMNEPSNFIRGSEDGCPNNELENPPYVPGVVGGTLQAATICASSHQFLSTHYNLHNLYGLTEAIASHRAL |
| | VKARGTRPFVISRSTFAGHGRYAGHWTGDVWSSWEQLASSVPEILQFNLLGVPLVGADVCGFLGNTSEELCVRWTQLGAFYPFMRNHNSLLSLPQEPYSFSEPAQQAMRKALTLRYALLPHLYTLFHQAHVAGETVARPLFLEFP |
| | KDSSTWTVDHQLLWGEALLITPVLQAGKAEVTGYFPLGTWYDLQTVPIEALGSLPPPPAAPREPAIHSEGQWVTLPAPLDTINVHLRAGYIIPLQGPGLTTTESRQQPMALAVALTKGGEARGELFWDDGESLEVLERGAYTQVI |
| | FLARNNTIVNELVRVTSEGAGLQLQKVTVLGVATAPQQVLSNGVPVSNFTYSPDTKVLDICVSLLMGEQFLVSWC |
| 110 | >mod GAA w/mut IL2 signal peptide |
| | MYRMQLLLLIALSLALVINSGHILLHDFLLVPRELSGSSPVLEETHPAHQQGASRPGPRDAQAHPGRPRAVPTQCDVPPNSRFDCAPDKAITQEQCEARGCCYIPAKQGLQGAQMGQPWCFFPPSYPSYKLENLSSSEMGYTATL |
| | TRTTPTFFPKDILTLRLDVMMETENRLHFTIKDPANRRYEVPLETPRVHSRAPSPLYSVEFSEEPFGVIVHRQLDGRVLLNTTVAPLFFADQFLQLSTSLPSQYITGLAEHLSPLMLSTSWTRITLWNRDLAPTPGANLYGSHPF |
| | YLALEDGGSAHGVFLLNSNAMDVVLQPSPALSWRSTGGILDVYIFLGPEPKSVVQQYLDVVGYPFMPPYWGLGFHLCRWGYSSTAITRQVVENMTRAHFPLDVQWNDLDYMDSRRDFTFNKDGFRDFPAMVQELHQGGRRYMMIV |
| | DPAISSSGPAGSYRPYDEGLRRGVFITNETGQPLIGKVWPGSTAFPDFTNPTALAWWEDMVAEFHDQVPFDGMWIDMNEPSNFIRGSEDGCPNNELENPPYVPGVVGGTLQAATICASSHQFLSTHYNLHNLYGLTEAIASHRAL |
| | VKARGTRPFVISRSTFAGHGRYAGHWTGDVWSSWEQLASSVPEILQFNLLGVPLVGADVCGFLGNTSEELCVRWTQLGAFYPFMRNHNSLLSLPQEPYSFSEPAQQAMRKALTLRYALLPHLYTLFHQAHVAGETVARPLFLEFP |
| | KDSSTWTVDHQLLWGEALLITPVLQAGKAEVTGYFPLGTWYDLQTVPIEALGSLPPPPAAPREPAIHSEGQWVTLPAPLDTINVHLRAGYIIPLQGPGLTTTESRQQPMALAVALTKGGEARGELFWDDGESLEVLERGAYTQVI |
| | FLARNNTIVNELVRVTSEGAGLQLQKVTVLGVATAPQQVLSNGVPVSNFTYSPDTKVLDICVSLLMGEQFLVSWC |
| 111 | >codon optimized GAA w/ codon optimized GAA signal peptide |
| | ATGGGAGTGAGGCACCCGCCCTGCTCCCACCGGCTCCTGGCCGTCTGCGCCCTCGTGTCCTTGGCAACCGCTGCACTCCTGGGGCACATCCTACTCCATGATTTCCTGCTGGTTCCCCGAGAGCTGAGTGGCTCCTCCCCAGTCC |
| | TGGAGGAGACTCACCCAGCTCACCAGCAGGGAGCCAGCAGACCAGGGCCCCGGGACGCCCAGGCACACCCCGGCCGTCCCAGAGCAGTGCCCACACAGTGCGACGTCCCCCCCAACAGCCGCTTCGATTGCGCCCCTGACAAGGC |
| | CATCACCCAGGAACAGTGCGAGGCCCGCGGCTGCTGCTACATCCCTGCAAAGCAGGGGCTGCAGGGAGCCCAGATGGGGCAGCCCTGGTGCTTCTTCCCACCCAGCTACCCCAGCTACAAGCTGGAGAACCTGAGCTCCTCTGAA |
| | ATGGGCTACACGGCCACCCTGACCCGTACCACCCCCACCTTCTTCCCCAAGGACATCCTGACCCTGCGGCTGGACGTGATGATGGAGACTGAGAACCGCCTCCACTTCACGATCAAAGATCCAGCTAACAGGCGCTACGAGGTGC |
| | CCTTGGAGACCCCGCGTGTCCACAGCCGGGCACCGTCCCCACTCTACAGCGTGGAGTTCTCCGAGGAGCCCTTCGGGGTGATCGTGCACCGGCAGCTGGACGGCCGCGTGCTGCTGAACACGACGGTGGCGCCCCTGTTCTTTGC |
| | GGACCAGTTCCTTCAGCTGTCCACCTCGCTGCCCTCGCAGTATATCACAGGCCTCGCCGAGCACCTCAGTCCCCTGATGCTCAGCACCAGCTGGACCAGGATCACCCTGTGGAACCGGGACCTTGCGCCCACGCCCGGTGCGAAC |
| | CTCTACGGGTCTCACCCTTTCTACCTGGCGCTGGAGGACGGCGGGTCGGCACACGGGGTGTTCCTGCTAAACAGCAACGCCATGGACGTGGTCCTGCAGCCGAGCCCTGCCCTTAGCTGGAGGTCGACAGGTGGGATCCTGGACG |
| | TCTACATCTTCCTGGGCCCAGAGCCCAAGAGCGTGGTGCAGCAGTACCTGGACGTGGTGGGATACCCGTTCATGCCGCCATACTGGGGCCTGGGCTTCCACCTGTGCCGCTGGGGCTACTCCTCCACCGCTATCACCCGCCAGGT |
| | GGTGGAGAACATGACCAGGGCCCACTTCCCCCTGGACGTCCAGTGGAACGATCTGGACTACATGGACTCCCGGAGGGACTTCACGTTCAACAAGGATGGCTTCCGGGACTTCCCGGCCATGGTGCAGGAGCTGCACCAGGGCGGC |
| | CGGCGCTACATGATGATCGTGGATCCTGCCATCAGCAGCTCGGGCCCTGCCGGGAGCTACAGGCCCTACGACGAGGGTCTGCGGAGGGGGGTTTTCATCACCAACGAGACCGGCCAGCCGCTGATTGGGAAGGTGTGGCCCGGGT |
| | CCACTGCCTTCCCCGACTTCACCAACCCCACAGCCCTGGCCTGGTGGGAGGACATGGTGGCTGAGTTCCATGACCAGGTGCCCTTCGACGGCATGTGGATTGACATGAACGAGCCTTCCAACTTCATCAGAGGCTCTGAGGACGG |
| | CTGCCCCAACAACGAGCTGGAGAACCCACCCTACGTGCCTGGGGTGGTTGGGGGGACCCTCCAGGCGGCCACCATCTGTGCCTCCAGCCACCAGTTTCTCTCCACACACTACAACCTGCACAACCTCTACGGCCTGACCGAAGCC |
| | ATCGCCTCCCACAGGGCGCTGGTGAAGGCTCGGGGGACACGCCCATTTGTGATCTCCCGCTCGACCTTTGCTGGCCACGGCCGATACGCCGGCCACTGGACGGGGGACGTGTGGAGCTCCTGGGAGCAGCTCGCCTCCTCCGTGC |
| | CAGAAATCCTGCAGTTTAACCTGCTGGGGGTGCCTCTGGTCGGGGCCGACGTCTGCGGCTTCCTGGGCAACACCTCAGAGGAGCTGTGTGTGCGCTGGACCCAGCTGGGGGCCTTCTACCCCTTCATGCGGAACCACAACAGCCT |
| | GCTCAGTCTGCCCCAGGAGCCGTACAGCTTCAGCGAGCCGGCCCAGCAGGCCATGAGGAAGGCCCTCACCCTGCGCTACGCACTCCTCCCCCACCTCTACACACTGTTCCACCAGGCCCACGTCGCGGGGGAGACCGTGGCCCGG |
| | CCCCTCTTCCTGGAGTTCCCCAAGGACTCTAGCACCTGGACTGTGGACCACCAGCTCCTGTGGGGGGAGGCCCTGCTCATCACCCCAGTGCTCCAGGCCGGGAAGGCCGAAGTGACTGGCTACTTCCCCTTGGGCACATGGTACG |
| | ACCTGCAGACGGTGCCAATAGAGGCCCTTGGCAGCCTCCCACCCCCACCTGCAGCTCCCCGTGAGCCAGCCATCCACAGCGAGGGGCAGTGGGTGACGCTGCCGGCCCCCCTGGACACCATCAACGTGCACCTCCGGGCTGGGTA |
| | CATCATCCCCCTGCAGGGCCCTGGCCTCACAACCACAGAGTCCCGCCAGCAGCCCATGGCCCTGGCTGTGGCCCTGACCAAGGGTGGAGAGGCCCGAGGGGAGCTGTTCTGGGACGACGGAGAGAGCCTGGAAGTGCTGGAGCGA |
| | GGGGCCTACACACAGGTCATCTTCCTGGCCAGGAATAACACGATCGTGAATGAGCTGGTACGTGTGACCAGTGAGGGAGCTGGCCTGCAGCTGCAGAAGGTGACTGTCCTGGGCGTGGCCACGGCGCCCCAGCAGGTCCTCTCCA |
| | ACGGTGTCCCTGTCTCCAACTTCACCTACAGCCCCGACACCAAGGTCCTGGACATCTGTGTCTCGCTGTTGATGGGAGAGCAGTTTCTCGTCAGCTGGTGTTGATAACTCGAG |
| 112 | > M2 pJAL130_dbDNA_MYO_GAA_CUP_Stop |
| | TCTAGAGCTAGCATATGGATCCATCGATTTAGGGATAACAGGGTAATTATCAGCACACAATTGCCCATTATACGCGCGTATAATGGACTATTGTGTGCTGATATCTGTACACTTAAGGGCTAGATCTTAGCTTACGTCACTAGAG |
| | GGTCCACGTTTAGTTTTTAAGATCCATTGATCTCCTAAACGCTGCAAGATTCGCAACCTGGTATACTTAGCCTAGGCGCTAGGTCCTAGTGCAGCGGGACTTTTTTTCTAAAGTCGTTGAGAGGAGGAGTCGTCAGACCAGATAG |
| | CTTTGATGTCCTGATCGGAAGGATCGTTGGCCCCCCTGCAGGCAGCTGTTAATTAACTGCGCGCTCGCTCGCTCACTGAGGCCGCCCGGGCAAAGCCCGGGCGTCGGGCGACCTTTGGTCGCCCGGCCTCAGTGAGCGAGCGAGC |
| | GCGCAGAGAGGGAGTGGCCAACTCCATCACTAGGGGTTCCTTGTAGTTAATGATTAACCCGCCATGCTACTTATCTACGGCGCGCCACGCGTTCTAGGAGTTAATTTTTAAAAAGCAGTCAAAAGTCCAAGTGCCCTTGCGAGCA |
| | TTTACTCTCTCTGTTTGCTCTGGTTAATAATCTCAGGAGCACAAACATTCCTTACTAGTTCTAGGAGTTAATTTTTAAAAAGCAGTCAAAAGTCCAAGTGCCCTTGCGAGCATTTACTCTCTCTGTTTGCTCTGGTTAATAATCT |
| | CAGGAGCACAAACATTCCTTACTAGTTCTAGAGCGGCCGCCAGTGTGCTGGAATTCGGCTTTTTTAGGGCTGGAAGCTACCTTTGACATCATTTCCTCTGCGAATGCATGTATAATTTCTACAGAACCTATTAGAAAGGATCACC |
| | CAGCCTCTGCTTTTGTACAACTTTCCCTTAAAAAACTGCCAATCCCACTGCTGTTTGGCCCAATAGTGAGAACTTTTTCCTGCTGCCTCTTGGTGCTTTTGCCTATGGCCCCTATTCTGCCTGCTGAAGACACTCTTGCCAGCAT |
| | GGACTTAAACCCCTCCAGCTCTGACAATCCTCTTTCTCTTTTGTTTTACATGAAGGGTCTGGCAGCCAAAGCAATCACTCAAAGTTCAAACCTTATCATTTTTTGCTTTGTTCCTCTTGGCCTTGGTTTTGTACATCAGCTGTGA |
| | AAATACCATCCCAGGGTATTTATAGCTGGGGTTAATTTATAACTGAGAGTGCTCTAGTTCTGCAATACAGGACATGCTATAAAAATGGAAAGATGTTGCTTTCTGAGAGATCAGCTTACATGTGCTAGCGTAGCCAACCATGGGA |
| | GTGAGGCACCCGCCCTGCTCCCACCGGCTCCTGGCCGTCTGCGCCCTCGTGTCCTTGGCAACCGCTGCACTCCTGGGGCACATCCTACTCCATGATTTCCTGCTGGTTCCCCGAGAGCTGAGTGGCTCCTCCCCAGTCCTGGAGG |
| | AGACTCACCCAGCTCACCAGCAGGGAGCCAGCAGACCAGGGCCCCGGGACGCCCAGGCACACCCCGGCCGTCCCAGAGCAGTGCCCACACAGTGCGACGTCCCCCCCAACAGCCGCTTCGATTGCGCCCCTGACAAGGCCATCAC |
| | CCAGGAACAGTGCGAGGCCCGCGGCTGCTGCTACATCCCTGCAAAGCAGGGGCTGCAGGGAGCCCAGATGGGGCAGCCCTGGTGCTTCTTCCCACCCAGCTACCCCAGCTACAAGCTGGAGAACCTGAGCTCCTCTGAAATGGGC |
| | TACACGGCCACCCTGACCCGTACCACCCCCACCTTCTTCCCCAAGGACATCCTGACCCTGCGGCTGGACGTGATGATGGAGACTGAGAACCGCCTCCACTTCACGATCAAAGATCCAGCTAACAGGCGCTACGAGGTGCCCTTGG |
| | AGACCCCGCGTGTCCACAGCCGGGCACCGTCCCCACTCTACAGCGTGGAGTTCTCCGAGGAGCCCTTCGGGGTGATCGTGCACCGGCAGCTGGACGGCCGCGTGCTGCTGAACACGACGGTGGCGCCCCTGTTCTTTGCGGACCA |
| | GTTCCTTCAGCTGTCCACCTCGCTGCCCTCGCAGTATATCACAGGCCTCGCCGAGCACCTCAGTCCCCTGATGCTCAGCACCAGCTGGACCAGGATCACCCTGTGGAACCGGGACCTTGCGCCCACGCCCGGTGCGAACCTCTAC |
| | GGGTCTCACCCTTTCTACCTGGCGCTGGAGGACGGCGGGTCGGCACACGGGGTGTTCCTGCTAAACAGCAACGCCATGGACGTGGTCCTGCAGCCGAGCCCTGCCCTTAGCTGGAGGTCGACAGGTGGGATCCTGGACGTCTACA |
| | TCTTCCTGGGCCCAGAGCCCAAGAGCGTGGTGCAGCAGTACCTGGACGTGGTGGGATACCCGTTCATGCCGCCATACTGGGGCCTGGGCTTCCACCTGTGCCGCTGGGGCTACTCCTCCACCGCTATCACCCGCCAGGTGGTGGA |
| | GAACATGACCAGGGCCCACTTCCCCCTGGACGTCCAGTGGAACGATCTGGACTACATGGACTCCCGGAGGGACTTCACGTTCAACAAGGATGGCTTCCGGGACTTCCCGGCCATGGTGCAGGAGCTGCACCAGGGCGGCCGGCGC |
| | TACATGATGATCGTGGATCCTGCCATCAGCAGCTCGGGCCCTGCCGGGAGCTACAGGCCCTACGACGAGGGTCTGCGGAGGGGGGTTTTCATCACCAACGAGACCGGCCAGCCGCTGATTGGGAAGGTGTGGCCCGGGTCCACTG |
| | CCTTCCCCGACTTCACCAACCCCACAGCCCTGGCCTGGTGGGAGGACATGGTGGCTGAGTTCCATGACCAGGTGCCCTTCGACGGCATGTGGATTGACATGAACGAGCCTTCCAACTTCATCAGAGGCTCTGAGGACGGCTGCCC |
| | CAACAACGAGCTGGAGAACCCACCCTACGTGCCTGGGGTGGTTGGGGGGACCCTCCAGGCGGCCACCATCTGTGCCTCCAGCCACCAGTTTCTCTCCACACACTACAACCTGCACAACCTCTACGGCCTGACCGAAGCCATCGCC |
| | TCCCACAGGGCGCTGGTGAAGGCTCGGGGGACACGCCCATTTGTGATCTCCCGCTCGACCTTTGCTGGCCACGGCCGATACGCCGGCCACTGGACGGGGGACGTGTGGAGCTCCTGGGAGCAGCTCGCCTCCTCCGTGCCAGAAA |
| | TCCTGCAGTTTAACCTGCTGGGGGTGCCTCTGGTCGGGGCCGACGTCTGCGGCTTCCTGGGCAACACCTCAGAGGAGCTGTGTGTGCGCTGGACCCAGCTGGGGGCCTTCTACCCCTTCATGCGGAACCACAACAGCCTGCTCAG |
| | TCTGCCCCAGGAGCCGTACAGCTTCAGCGAGCCGGCCCAGCAGGCCATGAGGAAGGCCCTCACCCTGCGCTACGCACTCCTCCCCCACCTCTACACACTGTTCCACCAGGCCCACGTCGCGGGGGAGACCGTGGCCCGGCCCCTC |
| | TTCCTGGAGTTCCCCAAGGACTCTAGCACCTGGACTGTGGACCACCAGCTCCTGTGGGGGGAGGCCCTGCTCATCACCCCAGTGCTCCAGGCCGGGAAGGCCGAAGTGACTGGCTACTTCCCCTTGGGCACATGGTACGACCTGC |
| | AGACGGTGCCAATAGAGGCCCTTGGCAGCCTCCCACCCCCACCTGCAGCTCCCCGTGAGCCAGCCATCCACAGCGAGGGGCAGTGGGTGACGCTGCCGGCCCCCCTGGACACCATCAACGTGCACCTCCGGGCTGGGTACATCAT |
| | CCCCCTGCAGGGCCCTGGCCTCACAACCACAGAGTCCCGCCAGCAGCCCATGGCCCTGGCTGTGGCCCTGACCAAGGGTGGAGAGGCCCGAGGGGAGCTGTTCTGGGACGACGGAGAGAGCCTGGAAGTGCTGGAGCGAGGGGCC |
| | TACACACAGGTCATCTTCCTGGCCAGGAATAACACGATCGTGAATGAGCTGGTACGTGTGACCAGTGAGGGAGCTGGCCTGCAGCTGCAGAAGGTGACTGTCCTGGGCGTGGCCACGGCGCCCCAGCAGGTCCTCTCCAACGGTG |
| | TCCCTGTCTCCAACTTCACCTACAGCCCCGACACCAAGGTCCTGGACATCTGTGTCTCGCTGTTGATGGGAGAGCAGTTTCTCGTCAGCTGGTGTTGATAACTCGAGCCGGGCGGAGTGTGTTAGTCTCTCCAGAGGGAGGCTGG |
| | TTCCCCAGGGAAGCAGAGCCTGTGTGCGGGCAGCAGCTGTGTGCGGGCCTGGGGGTTGTTAAGTGCAATTATTTTTAATAAAAGGGGCATTTGGAAAAAAAAAAAAAAGGTAGCAGTCGACAGATGAATTCTGCAGATCTGTGGC |
| | TTCTAGCTGCCCGGGTGGCATCCCTGTGACCCCTCCCCAGTGCCTCTCCTGGCCCTGGAAGTTGCCACTCCAGTGCCCACCAGCCTTGTCCTAATAAAATTAAGTTGCATCATTTTGTCTGACTAGGTGTCCTTCTATAATATTA |
| | TGGGGTGGAGGGGGGTGGTATGGAGCAAGGGGCAAGTTGGGAAGACAACCTGTAGGGCCTGCGGGGTCTATTGGGAACCAAGCTGGAGTGCAGTGGCACAATCTTGGCTCACTGCAATCTCCGCCTCCTGGGTTCAAGCGATTCT |
| | CCTGCCTCAGCCTCCCGAGTTGTTGGGATTCCAGGCATGCATGACCAGGCTCAGCTAATTTTTGTTTTTTTGGTAGAGACGGGGTTTCACCATATTGGCCAGGCTGGTCTCCAACTCCTAATCTCAGGTGATCTACCCACCTTGG |
| | CCTCCCAAATTGCTGGGATTACAGGCGTGAACCACTGCTCCCTTCCCTGTCCTTCTGATTTTAAAAAAAAGAGAAATGTTCTGGCACCTGCACTTGCACTGGGGACAGCCTATTTTGCTAGTTTGTTTTGTTTCGTTTTGTTTTG |
| | ATGGAGAGCGTATGTTGTTTAAACGCGGCCGCGTAGATAAGTAGCATGGCGGGTTAATCATTAACTACAAGGAACCCCTAGTGATGGAGTTGGCCACTCCCTCTCTGCGCGCTCGCTCGCTCACTGAGGCCGGGCGACCAAAGGT |
| | CGCCCGACGCCCGGGCTTTGCCCGGGCGGCCTCAGTGAGCGAGCGAGCGCGCAGTTAATTAAGGCGCCCTAGGCCGACCCTTAGACTCTGTACTCAGTTCTATAAACGAGCCATTGGATACGAGATCCGTAGATTGATAAGGGAC |
| | ACGGAATATCCCCGGACGCAATAGACACCGGTGGACAGCTTGGTATCCTGAGCACAGTCGCGCGTCCGAATCTAGCTCTACTTTAGAGGCCCCGGATTCTGATGGTCGTAGACCGCAGAACCGATTGGGGGGATGAGATCTACTA |
| | GTTATCAGCACACAATTGCCCATTATACGCGCGTATAATGGACTATTGTGTGCTGATATAGGGATAACAGGGTAATTCTAGAGCTAGCATATGGATCCATCGATTTGATGCGGTATTTTCTCCTTACGCATCTGTGCGGTATTTC |
| | ACACCGCATACGTCAAAGCAACCATAGTACGCGCCCTGTAGCGGCGCATTAAGCGCGGCGGGTGTGGTGGTTACGCGCAGCGTGACCGCTACACTTGCCAGCGCCCTAGCGCCCGCTCCTTTCGCTTTCTTCCCTTCCTTTCTCG |
| | CCACGTTCGCCGGCTTTCCCCGTCAAGCTCTAAATCGGGGGCTCCCTTTAGGGTTCCGATTTAGTGCTTTACGGCACCTCGACCCCAAAAAACTTGATTTGGGTGATGGTTCACGTAGTGGGCCATCGCCCTGATAGACGGTTTT |
| | TCGCCCTTTGACGTTGGAGTCCACGTTCTTTAATAGTGGACTCTTGTTCCAAACTGGAACAACACTCAACTCTATCTCGGGCTATTCTTTTGATTTATAAGGGATTTTGCCGATTTCGGTCTATTGGTTAAAAAATGAGCTGATT |
| | TAACAAAAATTTAACGCGAATTTTAACAAAATATTAACGTTTACAATTTTATGGTGCACTCTCAGTACAATCTGCTCTGATGCCGCATAGTTAAGCCAGCCCCGACACCCGCCAACACCCGCTGACGCGCCCTGACGGGCTTGTC |
| | TGCTCCCGGCATCCGCTTACAGACAAGCTGTGACCGTCTCCGGGAGCTGCATGTGTCAGAGGTTTTCACCGTCATCACCGAAACGCGCGAGACGAAAGGGCCTCGTGATACGCCTATTTTTATAGGTTAATGTCATGATAATAAT |
| | GGTTTCTTAGACGTCAGGTGGCACTTTTCGGGGAAATGTGCGCGGAACCCCTATTTGTTTATTTTTCTAAATACATTCAAATATGTATCCGCTCATGAGACAATAACCCTGATAAATGCTTCAATAATATTGAAAAAGGAAGAGT |
| | ATGAGCCATATTCAACGGGAAACGTCGAGGCCGCGATTAAATTCCAACATGGATGCTGATTTATATGGGTATAAATGGGCTCGCGATAATGTCGGGCAATCAGGTGCGACAATCTATCGCTTGTATGGGAAGCCCGATGCGCCAG |
| | AGTTGTTTCTGAAACATGGCAAAGGTAGCGTTGCCAATGATGTTACAGATGAGATGGTCAGACTAAACTGGCTGACGGAATTTATGCCTCTTCCGACCATCAAGCATTTTATCCGTACTCCTGATGATGCATGGTTACTCACCAC |
| | TGCGATCCCCGGAAAAACAGCATTCCAGGTATTAGAAGAATATCCTGATTCAGGTGAAAATATTGTTGATGCGCTGGCAGTGTTCCTGCGCCGGTTGCATTCGATTCCTGTTTGTAATTGTCCTTTTAACAGCGATCGCGTATTT |
| | CGTCTCGCTCAGGCGCAATCACGAATGAATAACGGTTTGGTTGATGCGAGTGATTTTGATGACGAGCGTAATGGCTGGCCTGTTGAACAAGTCTGGAAAGAAATGCATAAACTTTTGCCATTCTCACCGGATTCAGTCGTCACTC |
| | ATGGTGATTTCTCACTTGATAACCTTATTTTTGACGAGGGGAAATTAATAGGTTGTATTGATGTTGGACGAGTCGGAATCGCAGACCGATACCAGGATCTTGCCATCCTATGGAACTGCCTCGGTGAGTTTTCTCCTTCATTACA |
| | GAAACGGCTTTTTCAAAAATATGGTATTGATAATCCTGATATGAATAAATTGCAGTTTCATTTGATGCTCGATGAGTTTTTCTAAGCGTATAATGGTCTAGAGCTAGCATATGGATCCATCGATTCCATTATACGCCTGTCAGAC |
| | CAAGTTTACTCATATATACTTTAGATTGATTTAAAACTTCATTTTTAATTTAAAAGGATCTAGGTGAAGATCCTTTTTGATAATCTCATGACCAAAATCCCTTAACGTGAGTTTTCGTTCCACTGAGCGTCAGACCCCGTAGAAA |
| | AGATCAAAGGATCTTCTTGAGATCCTTTTTTTCTGCGCGTAATCTGCTGCTTGCAAACAAAAAAACCACCGCTACCAGCGGTGGTTTGTTTGCCGGATCAAGAGCTACCAACTCTTTTTCCGAAGGTAACTGGCTTCAGCAGAGC |
| | GCAGATACCAAATACTGTTCTTCTAGTGTAGCCGTAGTTAGGCCACCACTTCAAGAACTCTGTAGCACCGCCTACATACCTCGCTCTGCTAATCCTGTTACCAGTGGCTGCTGCCAGTGGCGATAAGTCGTGTCTTACCGGGTTG |
| | GACTCAAGACGATAGTTACCGGATAAGGCGCAGCGGTCGGGCTGAACGGGGGGTTCGTGCACACAGCCCAGCTTGGAGCGAACGACCTACACCGAACTGAGATACCTACAGCGTGAGCTATGAGAAAGCGCCACGCTTCCCGAAG |
| | GGAGAAAGGCGGACAGGTATCCGGTAAGCGGCAGGGTCGGAACAGGAGAGCGCACGAGGGAGCTTCCAGGGGGAAACGCCTGGTATCTTTATAGTCCTGTCGGGTTTCGCCACCTCTGACTTGAGCGTCGATTTTTGTGATGCTC |
| | GTCAGGGGGGCGGAGCCTATGGAAAAACGCCAGCAACGCGGCCTTTTTACGGTTCCTGGCCTTTTGCTGGCCTTTTGCTCACATGT |
| 113 | > M3 pJAL130_dbDNA MYO_GAA_CUP_Stop |
| | TCTAGAGCTAGCATATGGATCCATCGATTTAGGGATAACAGGGTAATTATCAGCACACAATTGCCCATTATACGCGCGTATAATGGACTATTGTGTGCTGATATCTGTACACTTAAGGGCTAGATCTTAGCTTACGTCACTAGAG |
| | GGTCCACGTTTAGTTTTTAAGATCCATTGATCTCCTAAACGCTGCAAGATTCGCAACCTGGTATACTTAGCCTAGGCGCTAGGTCCTAGTGCAGCGGGACTTTTTTTCTAAAGTCGTTGAGAGGAGGAGTCGTCAGACCAGATAG |
| | CTTTGATGTCCTGATCGGAAGGATCGTTGGCCCCCCTGCAGGCAGCTGTTAATTAACTGCGCGCTCGCTCGCTCACTGAGGCCGCCCGGGCAAAGCCCGGGCGTCGGGCGACCTTTGGTCGCCCGGCCTCAGTGAGCGAGCGAGC |
| | GCGCAGAGAGGGAGTGGCCAACTCCATCACTAGGGGTTCCTTGTAGTTAATGATTAACCCGCCATGCTACTTATCTACGGCGCGCCACGCGTTCTAGGAGTTAATTTTTAAAAAGCAGTCAAAAGTCCAAGTGCCCTTGCGAGCA |
| | TTTACTCTCTCTGTTTGCTCTGGTTAATAATCTCAGGAGCACAAACATTCCTTACTAGTTCTAGGAGTTAATTTTTAAAAAGCAGTCAAAAGTCCAAGTGCCCTTGCGAGCATTTACTCTCTCTGTTTGCTCTGGTTAATAATCT |
| | CAGGAGCACAAACATTCCTTACTAGTTCTAGAGCGGCCGCCAGTGTGCTGGAATTCGGCTTTTTTAGGGCTGGAAGCTACCTTTGACATCATTTCCTCTGCGAATGCATGTATAATTTCTACAGAACCTATTAGAAAGGATCACC |
| | CAGCCTCTGCTTTTGTACAACTTTCCCTTAAAAAACTGCCAATCCCACTGCTGTTTGGCCCAATAGTGAGAACTTTTTCCTGCTGCCTCTTGGTGCTTTTGCCTATGGCCCCTATTCTGCCTGCTGAAGACACTCTTGCCAGCAT |
| | GGACTTAAACCCCTCCAGCTCTGACAATCCTCTTTCTCTTTTGTTTTACATGAAGGGTCTGGCAGCCAAAGCAATCACTCAAAGTTCAAACCTTATCATTTTTTGCTTTGTTCCTCTTGGCCTTGGTTTTGTACATCAGCTTTGA |
| | AAATACCATCCCAGGGTTAATGCTGGGGTTAATTTATAACTGAGAGTGCTCTAGTTCTGCAATACAGGACATGCTATAAAAATGGAAAGATGTTGCTTTCTGAGAGATCAGCTTACATGTGCTAGCGTAGCCAACCATGGGAGTG |
| | AGGCACCCGCCCTGCTCCCACCGGCTCCTGGCCGTCTGCGCCCTCGTGTCCTTGGCAACCGCTGCACTCCTGGGGCACATCCTACTCCATGATTTCCTGCTGGTTCCCCGAGAGCTGAGTGGCTCCTCCCCAGTCCTGGAGGAGA |
| | CTCACCCAGCTCACCAGCAGGGAGCCAGCAGACCAGGGCCCCGGGACGCCCAGGCACACCCCGGCCGTCCCAGAGCAGTGCCCACACAGTGCGACGTCCCCCCCAACAGCCGCTTCGATTGCGCCCCTGACAAGGCCATCACCCA |
| | GGAACAGTGCGAGGCCCGCGGCTGCTGCTACATCCCTGCAAAGCAGGGGCTGCAGGGAGCCCAGATGGGGCAGCCCTGGTGCTTCTTCCCACCCAGCTACCCCAGCTACAAGCTGGAGAACCTGAGCTCCTCTGAAATGGGCTAC |
| | ACGGCCACCCTGACCCGTACCACCCCCACCTTCTTCCCCAAGGACATCCTGACCCTGCGGCTGGACGTGATGATGGAGACTGAGAACCGCCTCCACTTCACGATCAAAGATCCAGCTAACAGGCGCTACGAGGTGCCCTTGGAGA |
| | CCCCGCGTGTCCACAGCCGGGCACCGTCCCCACTCTACAGCGTGGAGTTCTCCGAGGAGCCCTTCGGGGTGATCGTGCACCGGCAGCTGGACGGCCGCGTGCTGCTGAACACGACGGTGGCGCCCCTGTTCTTTGCGGACCAGTT |
| | CCTTCAGCTGTCCACCTCGCTGCCCTCGCAGTATATCACAGGCCTCGCCGAGCACCTCAGTCCCCTGATGCTCAGCACCAGCTGGACCAGGATCACCCTGTGGAACCGGGACCTTGCGCCCACGCCCGGTGCGAACCTCTACGGG |
| | TCTCACCCTTTCTACCTGGCGCTGGAGGACGGCGGGTCGGCACACGGGGTGTTCCTGCTAAACAGCAACGCCATGGACGTGGTCCTGCAGCCGAGCCCTGCCCTTAGCTGGAGGTCGACAGGTGGGATCCTGGACGTCTACATCT |
| | TCCTGGGCCCAGAGCCCAAGAGCGTGGTGCAGCAGTACCTGGACGTGGTGGGATACCCGTTCATGCCGCCATACTGGGGCCTGGGCTTCCACCTGTGCCGCTGGGGCTACTCCTCCACCGCTATCACCCGCCAGGTGGTGGAGAA |
| | CATGACCAGGGCCCACTTCCCCCTGGACGTCCAGTGGAACGATCTGGACTACATGGACTCCCGGAGGGACTTCACGTTCAACAAGGATGGCTTCCGGGACTTCCCGGCCATGGTGCAGGAGCTGCACCAGGGCGGCCGGCGCTAC |
| | ATGATGATCGTGGATCCTGCCATCAGCAGCTCGGGCCCTGCCGGGAGCTACAGGCCCTACGACGAGGGTCTGCGGAGGGGGGTTTTCATCACCAACGAGACCGGCCAGCCGCTGATTGGGAAGGTGTGGCCCGGGTCCACTGCCT |
| | TCCCCGACTTCACCAACCCCACAGCCCTGGCCTGGTGGGAGGACATGGTGGCTGAGTTCCATGACCAGGTGCCCTTCGACGGCATGTGGATTGACATGAACGAGCCTTCCAACTTCATCAGAGGCTCTGAGGACGGCTGCCCCAA |
| | CAACGAGCTGGAGAACCCACCCTACGTGCCTGGGGTGGTTGGGGGGACCCTCCAGGCGGCCACCATCTGTGCCTCCAGCCACCAGTTTCTCTCCACACACTACAACCTGCACAACCTCTACGGCCTGACCGAAGCCATCGCCTCC |
| | CACAGGGCGCTGGTGAAGGCTCGGGGGACACGCCCATTTGTGATCTCCCGCTCGACCTTTGCTGGCCACGGCCGATACGCCGGCCACTGGACGGGGGACGTGTGGAGCTCCTGGGAGCAGCTCGCCTCCTCCGTGCCAGAAATCC |
| | TGCAGTTTAACCTGCTGGGGGTGCCTCTGGTCGGGGCCGACGTCTGCGGCTTCCTGGGCAACACCTCAGAGGAGCTGTGTGTGCGCTGGACCCAGCTGGGGGCCTTCTACCCCTTCATGCGGAACCACAACAGCCTGCTCAGTCT |
| | GCCCCAGGAGCCGTACAGCTTCAGCGAGCCGGCCCAGCAGGCCATGAGGAAGGCCCTCACCCTGCGCTACGCACTCCTCCCCCACCTCTACACACTGTTCCACCAGGCCCACGTCGCGGGGGAGACCGTGGCCCGGCCCCTCTTC |
| | CTGGAGTTCCCCAAGGACTCTAGCACCTGGACTGTGGACCACCAGCTCCTGTGGGGGGAGGCCCTGCTCATCACCCCAGTGCTCCAGGCCGGGAAGGCCGAAGTGACTGGCTACTTCCCCTTGGGCACATGGTACGACCTGCAGA |
| | CGGTGCCAATAGAGGCCCTTGGCAGCCTCCCACCCCCACCTGCAGCTCCCCGTGAGCCAGCCATCCACAGCGAGGGGCAGTGGGTGACGCTGCCGGCCCCCCTGGACACCATCAACGTGCACCTCCGGGCTGGGTACATCATCCC |
| | CCTGCAGGGCCCTGGCCTCACAACCACAGAGTCCCGCCAGCAGCCCATGGCCCTGGCTGTGGCCCTGACCAAGGGTGGAGAGGCCCGAGGGGAGCTGTTCTGGGACGACGGAGAGAGCCTGGAAGTGCTGGAGCGAGGGGCCTAC |
| | ACACAGGTCATCTTCCTGGCCAGGAATAACACGATCGTGAATGAGCTGGTACGTGTGACCAGTGAGGGAGCTGGCCTGCAGCTGCAGAAGGTGACTGTCCTGGGCGTGGCCACGGCGCCCCAGCAGGTCCTCTCCAACGGTGTCC |
| | CTGTCTCCAACTTCACCTACAGCCCCGACACCAAGGTCCTGGACATCTGTGTCTCGCTGTTGATGGGAGAGCAGTTTCTCGTCAGCTGGTGTTGATAACTCGAGCCGGGCGGAGTGTGTTAGTCTCTCCAGAGGGAGGCTGGTTC |
| | CCCAGGGAAGCAGAGCCTGTGTGCGGGCAGCAGCTGTGTGCGGGCCTGGGGGTTGTTAAGTGCAATTATTTTTAATAAAAGGGGCATTTGGAAAAAAAAAAAAAAGGTAGCAGTCGACAGATGAATTCTGCAGATCTGTGGCTTC |
| | TAGCTGCCCGGGTGGCATCCCTGTGACCCCTCCCCAGTGCCTCTCCTGGCCCTGGAAGTTGCCACTCCAGTGCCCACCAGCCTTGTCCTAATAAAATTAAGTTGCATCATTTTGTCTGACTAGGTGTCCTTCTATAATATTATGG |
| | GGTGGAGGGGGGTGGTATGGAGCAAGGGGCAAGTTGGGAAGACAACCTGTAGGGCCTGCGGGGTCTATTGGGAACCAAGCTGGAGTGCAGTGGCACAATCTTGGCTCACTGCAATCTCCGCCTCCTGGGTTCAAGCGATTCTCCT |
| | GCCTCAGCCTCCCGAGTTGTTGGGATTCCAGGCATGCATGACCAGGCTCAGCTAATTTTTGTTTTTTTGGTAGAGACGGGGTTTCACCATATTGGCCAGGCTGGTCTCCAACTCCTAATCTCAGGTGATCTACCCACCTTGGCCT |
| | CCCAAATTGCTGGGATTACAGGCGTGAACCACTGCTCCCTTCCCTGTCCTTCTGATTTTAAAAAAAAGAGAAATGTTCTGGCACCTGCACTTGCACTGGGGACAGCCTATTTTGCTAGTTTGTTTTGTTTCGTTTTGTTTTGATG |
| | GAGAGCGTATGTTGTTTAAACGCGGCCGCGTAGATAAGTAGCATGGCGGGTTAATCATTAACTACAAGGAACCCCTAGTGATGGAGTTGGCCACTCCCTCTCTGCGCGCTCGCTCGCTCACTGAGGCCGGGCGACCAAAGGTCGC |
| | CCGACGCCCGGGCTTTGCCCGGGCGGCCTCAGTGAGCGAGCGAGCGCGCAGTTAATTAAGGCGCCCTAGGCCGACCCTTAGACTCTGTACTCAGTTCTATAAACGAGCCATTGGATACGAGATCCGTAGATTGATAAGGGACACG |
| | GAATATCCCCGGACGCAATAGACACCGGTGGACAGCTTGGTATCCTGAGCACAGTCGCGCGTCCGAATCTAGCTCTACTTTAGAGGCCCCGGATTCTGATGGTCGTAGACCGCAGAACCGATTGGGGGGATGAGATCTACTAGTT |
| | ATCAGCACACAATTGCCCATTATACGCGCGTATAATGGACTATTGTGTGCTGATATAGGGATAACAGGGTAATTCTAGAGCTAGCATATGGATCCATCGATTTGATGCGGTATTTTCTCCTTACGCATCTGTGCGGTATTTCACA |
| | CCGCATACGTCAAAGCAACCATAGTACGCGCCCTGTAGCGGCGCATTAAGCGCGGCGGGTGTGGTGGTTACGCGCAGCGTGACCGCTACACTTGCCAGCGCCCTAGCGCCCGCTCCTTTCGCTTTCTTCCCTTCCTTTCTCGCCA |
| | CGTTCGCCGGCTTTCCCCGTCAAGCTCTAAATCGGGGGCTCCCTTTAGGGTTCCGATTTAGTGCTTTACGGCACCTCGACCCCAAAAAACTTGATTTGGGTGATGGTTCACGTAGTGGGCCATCGCCCTGATAGACGGTTTTTCG |
| | CCCTTTGACGTTGGAGTCCACGTTCTTTAATAGTGGACTCTTGTTCCAAACTGGAACAACACTCAACTCTATCTCGGGCTATTCTTTTGATTTATAAGGGATTTTGCCGATTTCGGTCTATTGGTTAAAAAATGAGCTGATTTAA |
| | CAAAAATTTAACGCGAATTTTAACAAAATATTAACGTTTACAATTTTATGGTGCACTCTCAGTACAATCTGCTCTGATGCCGCATAGTTAAGCCAGCCCCGACACCCGCCAACACCCGCTGACGCGCCCTGACGGGCTTGTCTGC |
| | TCCCGGCATCCGCTTACAGACAAGCTGTGACCGTCTCCGGGAGCTGCATGTGTCAGAGGTTTTCACCGTCATCACCGAAACGCGCGAGACGAAAGGGCCTCGTGATACGCCTATTTTTATAGGTTAATGTCATGATAATAATGGT |
| | TTCTTAGACGTCAGGTGGCACTTTTCGGGGAAATGTGCGCGGAACCCCTATTTGTTTATTTTTCTAAATACATTCAAATATGTATCCGCTCATGAGACAATAACCCTGATAAATGCTTCAATAATATTGAAAAAGGAAGAGTATG |
| | AGCCATATTCAACGGGAAACGTCGAGGCCGCGATTAAATTCCAACATGGATGCTGATTTATATGGGTATAAATGGGCTCGCGATAATGTCGGGCAATCAGGTGCGACAATCTATCGCTTGTATGGGAAGCCCGATGCGCCAGAGT |
| | TGTTTCTGAAACATGGCAAAGGTAGCGTTGCCAATGATGTTACAGATGAGATGGTCAGACTAAACTGGCTGACGGAATTTATGCCTCTTCCGACCATCAAGCATTTTATCCGTACTCCTGATGATGCATGGTTACTCACCACTGC |
| | GATCCCCGGAAAAACAGCATTCCAGGTATTAGAAGAATATCCTGATTCAGGTGAAAATATTGTTGATGCGCTGGCAGTGTTCCTGCGCCGGTTGCATTCGATTCCTGTTTGTAATTGTCCTTTTAACAGCGATCGCGTATTTCGT |
| | CTCGCTCAGGCGCAATCACGAATGAATAACGGTTTGGTTGATGCGAGTGATTTTGATGACGAGCGTAATGGCTGGCCTGTTGAACAAGTCTGGAAAGAAATGCATAAACTTTTGCCATTCTCACCGGATTCAGTCGTCACTCATG |
| | GTGATTTCTCACTTGATAACCTTATTTTTGACGAGGGGAAATTAATAGGTTGTATTGATGTTGGACGAGTCGGAATCGCAGACCGATACCAGGATCTTGCCATCCTATGGAACTGCCTCGGTGAGTTTTCTCCTTCATTACAGAA |
| | ACGGCTTTTTCAAAAATATGGTATTGATAATCCTGATATGAATAAATTGCAGTTTCATTTGATGCTCGATGAGTTTTTCTAAGCGTATAATGGTCTAGAGCTAGCATATGGATCCATCGATTCCATTATACGCCTGTCAGACCAA |
| | GTTTACTCATATATACTTTAGATTGATTTAAAACTTCATTTTTAATTTAAAAGGATCTAGGTGAAGATCCTTTTTGATAATCTCATGACCAAAATCCCTTAACGTGAGTTTTCGTTCCACTGAGCGTCAGACCCCGTAGAAAAGA |
| | TCAAAGGATCTTCTTGAGATCCTTTTTTTCTGCGCGTAATCTGCTGCTTGCAAACAAAAAAACCACCGCTACCAGCGGTGGTTTGTTTGCCGGATCAAGAGCTACCAACTCTTTTTCCGAAGGTAACTGGCTTCAGCAGAGCGCA |
| | GATACCAAATACTGTTCTTCTAGTGTAGCCGTAGTTAGGCCACCACTTCAAGAACTCTGTAGCACCGCCTACATACCTCGCTCTGCTAATCCTGTTACCAGTGGCTGCTGCCAGTGGCGATAAGTCGTGTCTTACCGGGTTGGAC |
| | TCAAGACGATAGTTACCGGATAAGGCGCAGCGGTCGGGCTGAACGGGGGGTTCGTGCACACAGCCCAGCTTGGAGCGAACGACCTACACCGAACTGAGATACCTACAGCGTGAGCTATGAGAAAGCGCCACGCTTCCCGAAGGGA |
| | GAAAGGCGGACAGGTATCCGGTAAGCGGCAGGGTCGGAACAGGAGAGCGCACGAGGGAGCTTCCAGGGGGAAACGCCTGGTATCTTTATAGTCCTGTCGGGTTTCGCCACCTCTGACTTGAGCGTCGATTTTTGTGATGCTCGTC |
| | AGGGGGGCGGAGCCTATGGAAAAACGCCAGCAACGCGGCCTTTTTACGGTTCCTGGCCTTTTGCTGGCCTTTTGCTCACATGT |
| 270 | > CRM_SP0107 |
| | CCCTGGAGAGTCCTTTAGCAGGGCAAAGTGCAACATAGGCAGACCTTAAGGGATGACTCAGTAACAGATAAGCTTTGTGTGCCTGCAGGGGGATGGGAAGAGGGTGGGGCAGGAGAGGGACATAAAAGGGCTCTGAGGCATTGTA |
| | CTGTGAATTCCTTCAGTCTCCTGTTTGGAGAAGACAGAGCCAATGAGGCCCTCGTTCCAGGGAAACAGAATATGCTCAGCATGACGCAGCACTCCCTGAACTTTCCGGTTACATCACCCAATAGCTGAGATCAGA |
| 271 | > CRM_SP0109 |
| | CCCTGGAGAGTCCTTTAGCAGGGCAAAGTGCAACATAGGCAGACCTTAAGGGATGACTCAGTAACAGATAAGCTTTGTGTGCCTGCAGGGGGATGGGAAGAGGGTGGGGCAGGAGAGGGACATAAAAGGGCTCTGAGGCATTGTA |
| | CTGTGAATTCCTTCAGTCTCCTGCTCTGCTCAGCCAGTCAGCCCTGCCTCCCTTGTTTAGGACCACACAGCACTGCTGGGTGTCTGCCTTTCCTTG |
| 273 | > CRM_SP0111 |
| | AGGTTAATTTTTAAAAAGCAGTCAAAAGTCCAAGTGGCCCTTGGCAGCATTTACTCTCTCTGTTTGCTCTGGTTAATAATCTCAGGAGCACAAACATTCCTTTGGAGAAGACAGAGCCAATGAGGCCCTCGTTCCAGGGAAACAG |
| | AATATGCTCAGCATGACGCAGCACTCCCTGAACTTTCCGGTTACATCACCCAATAGCTGAGATCAGA |
| 274 | > CRM_SP0112 |
| | CACTGAACCCTTGACCCCTGCCCTGCAGCCCCCGCAGCTTGCTGTTTGCCCACTCTATTTGCCCAGCCCCAGAGGTTAATTTTTAAAAAGCAGTCAAAAGTCCAAGTGGCCCTTGGCAGCATTTACTCTCTCTGTTTGCTCTGGT |
| | TAATAATCTCAGGAGCACAAACATTCCTTTGGAGAAGACAGAGCCAATGAGGCCCTCGTTCCAGGGAAACAGAATATGCTCAGCATGACGCAGCACTCCCTGAACTTTCCGGTTACATCACCCAATAGCTGAGATCAGA |
| 275 | > CRM_SP0113 |
| | CACTGAACCCTTGACCCCTGCCCTGCAGCCCCCGCAGCTTGCTGTTTGCCCACTCTATTTGCCCAGCCCCAGCCCTGGAGAGTCCTTTAGCAGGGCAAAGTGCAACATAGGCAGACCTTAAGGGATGACTCAGTAACAGATAAGC |
| | TTTGTGTGCCTGCAGGGGGATGGGAAGAGGGTGGGGCAGGAGAGGGACATAAAAGGGCTCTGAGGCATTGTACTGTGAATTCCTTCAGTCTCCTG |
| 276 | > CRM_SP0115 |
| | CCCTGGAGAGTCCTTTAGCAGGGCAAAGTGCAACATAGGCAGACCTTAAGGGATGACTCAGTAACAGATAAGCTTTGTGTGCCTGCAGGGGGATGGGAAGAGGGTGGGGCAGGAGAGGGACATAAAAGGGCTCTGAGGCATTGTA |
| | CTGTGAATTCCTTCAGTCTCCTGCTCTGCTCAGCCAGTCAGCCCTGCCTCCCTTGTTTAGGACCACACAGCACTGCTGGGTGTCTGCCTTTCCTTG |
| 277 | > CRM_SP0116 |
| | CCCTGGAGAGTCCTTTAGCAGGGCAAAGTGCAACATAGGCAGACCTTAAGGGATGACTCAGTAACAGATAAGCTTTGTGTGCCTGCAGGGGGATGGGAAGAGGGTGGGGCAGGAGAGGGACATAAAAGGGCTCTGAGGCATTGTA |
| | CTGTGAATTCCTTCAGTCTCCTG |
| 278 | > CRM_SP0121 |
| | CCCTGGAGAGTCCTTTAGCAGGGCAAAGTGCAACATAGGCAGACCTTAAGGGATGACTCAGTAACAGATAAGCTTTGTGTGCCTGCACCCTGGAGAGTCCTTTAGCAGGGCAAAGTGCAACATAGGCAGACCTTAAGGGATGACT |
| | CAGTAACAGATAAGCTTTGTGTGCCTGCA |
| 279 | > CRM_SP0124 |
| | CACTGAACCCTTGACCCCTGCCCTGCAGCCCCCGCAGCTTGCTGTTTGCCCACTCTATTTGCCCAGCCCCAGCCCTGGAGAGTCCTTTAGCAGGGCAAAGTGCAACATAGGCAGACCTTAAGGGATGACTCAGTAACAGATAAGC |
| | TTTGTGTGCCTGCA |
| 280 | > CRM_SP0127 (CRM_LVR_127) |
| | AGAATGAACATTGAACTTTGGACTATACCTGAGGGGTGAGGTAAACAACAGGACTATAAATGGCCCGGGAGGCGCCCTTTGGACCTTTTGCAATCCTGGCGCACTGAACCCTTGACCCCTGCCCTGCAGCCCCCGCAGCTTGCTG |
| | TTTGCCCACTCTATTTGCCCAGCCCCAGGGACAGAGCTGATCCTTGAACTCTTAAGTTCCAC |
| 281 | > CRM_SP0127A1 (CRM_LVR_127_A1) |
| | AGGTTAATTTTTAAAAAGCAGTCAAAAGTCCAAGTGGCCCTTGGCAGCATTTACTCTCTCTGTTTGCTCTGGTTAATAATCTCAGGAGCACAAACATTCCTGTACCAGAATGAACATTGAACTTTGGACTATACCTGAGGGGTGA |
| | GGTAAACAACAGGACTATAAATGGCCCGGGAGGCGCCCTTTGGACCTTTTGCAATCCTGGCGCACTGAACCCTTGACCCCTGCCCTGCAGCCCCCGCAGCTTGCTGTTTGCCCACTCTATTTGCCCAGCCCCAGGGACAGAGCTG |
| | ATCCTTGAACTCTTAAGTTCCAC |
| 282 | > CRM_SP0127V1 (CRM_LVR_127_V1) |
| | AAGCAAATATTTGTGGTTATGGATTAACTCGAACTGTTTGCCCACTCTATTTGCCCTGTACCAGAATGAACATTGAACTTTGGACTATACCTGAGGGGTGAGGTAAACAACAGGACTATAAATGGCCCGGGAGGCGCCCTTTGGA |
| | CCTTTTGCAATCCTGGCGCACTGAACCCTTGACCCCTGCCCTGCAGCCCCCGCAGCTTGCTGTTTGCCCACTCTATTTGCCCAGCCCCAGGGACAGAGCTGATCCTTGAACTCTTAAGTTCCAC |
| 283 | > CRM_SP0127V2 (CRM_LVR_127_V2) |
| | GGCGCCCTTTGGACCTTTTGCAATCCTGGAGCAAACAGCAAACACTGTACCAGAATGAACATTGAACTTTGGACTATACCTGAGGGGTGAGGTAAACAACAGGACTATAAATGGCCCGGGAGGCGCCCTTTGGACCTTTTGCAAT |
| | CCTGGCGCACTGAACCCTTGACCCCTGCCCTGCAGCCCCCGCAGCTTGCTGTTTGCCCACTCTATTTGCCCAGCCCCAGGGACAGAGCTGATCCTTGAACTCTTAAGTTCCAC |
| 284 | > CRM_SP0128 |
| | AGAATGAACATTGAACTTTGGACTATACCTGAGGGGTGAGGTAAACAACAGGACTATAAATAGAATGAACATTGAACTTTGGACTATACCTGAGGGGTGAGGTAAACAACAGGACTATAAATCACTGAACCCTTGACCCCTGCCC |
| | TGCAGCCCCCGCAGCTTGCTGTTTGCCCACTCTATTTGCCCAGCCCCAG |
| 285 | > CRM_SP0131 (CRM_LVR 131) |
| | GGCCCGGGAGGCGCCCTTTGGACCTTTTGCAATCCTGGCGCACTGAACCCTTGACCCCTGCCCTGCAGCCCCCGCAGCTTGCTGTTTGCCCACTCTATTTGCCCAGCCCCAGCCCTGGAGAGTCCTTTAGCAGGGCAAAGTGCAA |
| | CATAGGCAGACCTTAAGGGATGACTCAGTAACAGATAAGCTTTGTGTGCCTGCA |
| 286 | > CRM_SP0132 (CRM_LVR 132 |
| | AGAATGAACATTGAACTTTGGACTATACCTGAGGGGTGAGGTAAACAACAGGACTATAAATGGCCCGGGAGGCGCCCTTTGGACCTTTTGCAATCCTGGCGCACTGAACCCTTGACCCCTGCCCTGCAGCCCCCGCAGCTTGCTG |
| | TTTGCCCACTCTATTTGCCCAGCCCCAGCCCTGGAGAGTCCTTTAGCAGGGCAAAGTGCAACATAGGCAGACCTTAAGGGATGACTCAGTAACAGATAAGCTTTGTGTGCCTGCA |
| 287 | >CRM_SP0133 (CRM_LVR_133) |
| | AGAATGAACATTGAACTTTGGACTATACCTGAGGGGTGAGGTAAACAACAGGACTATAAATGGCCCGGGAGGCGCCCTTTGGACCTTTTGCAATCCTGGCG |
| 288 | > CRM_SP0155 |
| | GCTGGTTTCTTATAAAACTGATGGAAGATACAAACACTATTAAAGAACTGTTTGCATGTTGCAAATGATGTCCAAAGTCCAAACATTGTTAATAATTAATACTCCAATAAACATCATGTCAGAATTTCTGTTTTCTTTTCCCTTT |
| | GAACCTTTGCAGGATTGCCACATCATCAGGACCACACCTTCATCAGGAATGAATAT |
| 289 | > CRM_SP0158 |
| | ATTGGCATCTTCTATTGCTTTTCCTGGTGACTTCATTTTTCACTCTTGGCTAAAAATGGGTCTCTGATGATTTATTCTATCCTGGGTGTTGACAAGCTGAAGAAGTTGTGTGGGGCCTGCTGCCAGTAACCCTGGGTGACGAAGC |
| | GTGACTCACCACTCCGAGGTCAGTGGGGGGATGGAAGGCAGGGGAGTCAGCTGACAAGATCTGCTGCTTTGTCACCAGGCCTTCTGC |
| 290 | > CRM_SP0163 |
| | TGAAATGCCTGCCATATATTAGTGCCCTGAAGTCCAAAGGTAGAGGAACCGAGTGTTTAAAAATTACTGTGGCTGTGGAGTCAACATGATGTAAAAAAACAAACATTTGGATAACACCAAGAAGCCAGATATGGTTGAAATGTTG |
| | ACTGGTTGACAAAAATAATTTGGGTTGCTTAATGGTGCACAAAGGTAATGCAAAA |
| 291 | > CRM_SP0236 |
| | CAGGCTTTCACTTTCTCGCCAACTTACAAGGCCTTTCTGTGTAAACAATACCTGAACCTTTACCCCGTTGCCCGGCAACGGCCAGGTCTGTGCCAAGTGTTTG |
| 292 | > CRM_SP0239 |
| | CAGGCTTTCACTTTCTCGCCAACTTACAAGGCCTTTCTGTGTAAACAATACCTGAACCTTTACCCCGTTGCCCGGCAACGGCCAGGTCTGTGCCAAGTGTTTGAGGTTAATTTTTAAAAAGCAGTCAAAAGTCCAAGTGGCCCTT |
| | GGCAGCATTTACTCTCTCTGTTTGCTCTGGTTAATAATCTCAGGAGCACAAACATTCCGGCCCGGGAGGCGCCCTTTGGACCTTTTGCAATCCTGGCGCACTGAACCCTTGACCCCTGCCCTGCAGCCCCCGCAGCTTGCTGTTT |
| | GCCCACTCTATTTGCCCAGCCCCAGCCCTGGAGAGTCCTTTAGCAGGGCAAAGTGCAACATAGGCAGACCTTAAGGGATGACTCAGTAACAGATAAGCTTTGTGTGCCTGCA |
| 293 | > CRM_SP0240 |
| | CAGGCTTTCACTTTCTCGCCAACTTACAAGGCCTTTCTGTGTAAACAATACCTGAACCTTTACCCCGTTGCCCGGCAACGGCCAGGTCTGTGCCAAGTGTTTG |
| 294 | > CRM_SP0241 |
| | AGGTTAATTTTTAAAAAGCAGTCAAAAGTCCAAGTGGCCCTTGGCAGCATTTACTCTCTCTGTTTGCTCTGGTTAATAATCTCAGGAGCACAAACATTCCGGCCCGGGAGGCGCCCTTTGGACCTTTTGCAATCCTGGCGCACTG |
| | AACCCTTGACCCCTGCCCTGCAGCCCCCGCAGCTTGCTGTTTGCCCACTCTATTTGCCCAGCCCCAGCCCTGGAGAGTCCTTTAGCAGGGCAAAGTGCAACATAGGCAGACCTTAAGGGATGACTCAGTAACAGATAAGCTTTGT |
| | GTGCCTGCA |
| 295 | > CRM_SP0242 |
| | AGGTTAATTTTTAAAAAGCAGTCAAAAGTCCAAGTGGCCCTTGGCAGCATTTACTCTCTCTGTTTGCTCTGGTTAATAATCTCAGGAGCACAAACATTCCGGCCCGGGAGGCGCCCTTTGGACCTTTTGCAATCCTGGCGCACTG |
| | AACCCTTGACCCCTGCCCTGCAGCCCCCGCAGCTTGCTGTTTGCCCACTCTATTTGCCCAGCCCCAG |
| 296 | > CRM_SP0243 |
| | TGAAATGCCTGCCATATATTAGTGCCCTGAAGTCCAAAGGTAGAGGAACCGAGTGTTTAAAAATTACTGTGGCTGTGGAGTCAACATGATGTAAAAAAACAAACATTTGGATAACACCAAGAAGCCAGATATGGTTGAAATGTTG |
| | ACTGGTTGACAAAAATAATTTGGGTTGCTTAATGGTGCACAAAGGTAATGCAAAAAGGTTAATTTTTAAAAAGCAGTCAAAAGTCCAAGTGGCCCTTGGCAGCATTTACTCTCTCTGTTTGCTCTGGTTAATAATCTCAGGAGCA |
| | CAAACATTCCGGCCCGGGAGGCGCCCTTTGGACCTTTTGCAATCCTGGCGCACTGAACCCTTGACCCCTGCCCTGCAGCCCCCGCAGCTTGCTGTTTGCCCACTCTATTTGCCCAGCCCCAGCCCTGGAGAGTCCTTTAGCAGGG |
| | CAAAGTGCAACATAGGCAGACCTTAAGGGATGACTCAGTAACAGATAAGCTTTGTGTGCCTGCA |
| 297 | > CRM_SP0244 |
| | CTTTGGACCTTTTGCAATCCTGGCGCACTGAACCCTTGACCCCTGCCCTGCAGCCCCCGCAGCTTGCTGTTTGCCCACTCTATTTGCCCAGCCCCAGTGAAATGCCTGCCATATATTAGTGCCCTGAAGTCCAAAGGTAGAGGAA |
| | CCGAGTGTTTAAAAATTACTGTGGCTGTGGAGTCAACATGATGTAAAAAAACAAACATTTGGATAACACCAAGAAGCCAGATATGGTTGAAATGTTGACTGGTTGACAAAAATAATTTGGGTTGCTTAATGGTGCACAAAGGTAA |
| | TGCAAAA |
| 298 | > CRM_SP0246 |
| | AGGTTAATTTTTAAAAAGCAGTCAAAAGTCCAAGTGGCCCTTGGCAGCATTTACTCTCTCTGTTTGCTCTGGTTAATAATCTCAGGAGCACAAACATTCCGGCCCGGGAGGCGCCCTTTGGACCTTTTGCAATCCTGGCGCACTG |
| | AACCCTTGACCCCTGCCCTGCAGCCCCCGCAGCTTGCTGTTTGCCCACTCTATTTGCCCAGCCCCAG |
| 299 | > CRM_SP0247 |
| | GCTGGTTTCTTATAAAACTGATGGAAGATACAAACACTATTAAAGAACTGTTTGCATGTTGCAAATGATGTCCAAAGTCCAAACATTGTTAATAATTAATACTCCAATAAACATCATGTCAGAATTTCTGTTTTCTTTTCCCTTT |
| | GAACCTTTGCAGGATTGCCACATCATCAGGACCACACCTTCATCAGGAATGAATATCAGGCTTTCACTTTCTCGCCAACTTACAAGGCCTTTCTGTGTAAACAATACCTGAACCTTTACCCCGTTGCCCGGCAACGGCCAGGTCT |
| | GTGCCAAGTGTTTG |
| 300 | > CRM_SP0248 |
| | AGGTTAATTTTTAAAAAGCAGTCAAAAGTCCAAGTGGCCCTTGGCAGCATTTACTCTCTCTGTTTGCTCTGGTTAATAATCTCAGGAGCACAAACATTCCGGCCCGGGAGGCGCCCTTTGGACCTTTTGCAATCCTGGCGCACTG |
| | AACCCTTGACCCCTGCCCTGCAGCCCCCGCAGCTTGCTGTTTGCCCACTCTATTTGCCCAGCCCCAGCAGGCTTTCACTTTCTCGCCAACTTACAAGGCCTTTCTGTGTAAACAATACCTGAACCTTTACCCCGTTGCCCGGCAA |
| | CGGCCAGGTCTGTGCCAAGTGTTTG |
| 301 | > CRM_SP0249 |
| | AGGTTAATTTTTAAAAAGCAGTCAAAAGTCCAAGTGGCCCTTGGCAGCATTTACTCTCTCTGTTTGCTCTGGTTAATAATCTCAGGAGCACAAACATTCCGGCCCGGGAGGCGCCCTTTGGACCTTTTGCAATCCTGGCGCACTG |
| | AACCCTTGACCCCTGCCCTGCAGCCCCCGCAGCTTGCTGTTTGCCCACTCTATTTGCCCAGCCCCAGCAGGCTTTCACTTTCTCGCCAACTTACAAGGCCTTTCTGTGTAAACAATACCTGAACCTTTACCCCGTTGCCCGGCAA |
| | CGGCCAGGTCTGTGCCAAGTGTTTG |
| 302 | > CRM_SP0250 |
| | AGGTTAATTTTTAAAAAGCAGTCAAAAGTCCAAGTGGCCCTTGGCAGCATTTACTCTCTCTGTTTGCTCTGGTTAATAATCTCAGGAGCACAAACATTCCGGCCCGGGAGGCGCCCTTTGGACCTTTTGCAATCCTGGCGCACTG |
| | AACCCTTGACCCCTGCCCTGCAGCCCCCGCAGCTTGCTGTTTGCCCACTCTATTTGCCCAGCCCCAGGCTGGTTTCTTATAAAACTGATGGAAGATACAAACACTATTAAAGAACTGTTTGCATGTTGCAAATGATGTCCAAAGT |
| | CCAAACATTGTTAATAATTAATACTCCAATAAACATCATGTCAGAATTTCTGTTTTCTTTTCCCTTTGAACCTTTGCAGGATTGCCACATCATCAGGACCACACCTTCATCAGGAATGAATAT |
| 303 | > CRM_SP0251 |
| | AGGTTAATTTTTAAAAAGCAGTCAAAAGTCCAAGTGGCCCTTGGCAGCATTTACTCTCTCTGTTTGCTCTGGTTAATAATCTCAGGAGCACAAACATTCCGGCCCGGGAGGCGCCCTTTGGACCTTTTGCAATCCTGGCGCACTG |
| | AACCCTTGACCCCTGCCCTGCAGCCCCCGCAGCTTGCTGTTTGCCCACTCTATTTGCCCAGCCCCAGAAGCAAATATTTGTGGTTATGGATTAACTCGAACTGTTTGCCCACTCTATTTGCCC |
| 304 | > CRM_SP0252 |
| | AAGCAAATATTTGTGGTTATGGATTAACTCGAACTGTTTGCCCACTCTATTTGCCCCAGGCTTTCACTTTCTCGCCAACTTACAAGGCCTTTCTGTGTAAACAATACCTGAACCTTTACCCCGTTGCCCGGCAACGGCCAGGTCT |
| | GTGCCAAGTGTTTG |
| 305 | > CRM_SP0253 |
| | AAGCAAATATTTGTGGTTATGGATTAACTCGAACTGTTTGCCCACTCTATTTGCCCCAGGCTTTCACTTTCTCGCCAACTTACAAGGCCTTTCTGTGTAAACAATACCTGAACCTTTACCCCGTTGCCCGGCAACGGCCAGGTCT |
| | GTGCCAAGTGTTTG |
| 306 | > CRM_SP0254 |
| | AGGTTAATTTTTAAAAAGCAGTCAAAAGTCCAAGTGGCCCTTGGCAGCATTTACTCTCTCTGTTTGCTCTGGTTAATAATCTCAGGAGCACAAACATTCCGGCCCGGGAGGCGCCCTTTGGACCTTTTGCAATCCTGGCGCAGGC |
| | TTTCACTTTCTCGCCAACTTACAAGGCCTTTCTGTGTAAACAATACCTGAACCTTTACCCCGTTGCCCGGCAACGGCCAGGTCTGTGCCAAGTGTTTG |
| 307 | > CRM_SP0255 |
| | AGGTTAATTTTTAAAAAGCAGTCAAAAGTCCAAGTGGCCCTTGGCAGCATTTACTCTCTCTGTTTGCTCTGGTTAATAATCTCAGGAGCACAAACATTCCGGCCCGGGAGGCGCCCTTTGGACCTTTTGCAATCCTGGCGCAGGC |
| | TTTCACTTTCTCGCCAACTTACAAGGCCTTTCTGTGTAAACAATACCTGAACCTTTACCCCGTTGCCCGGCAACGGCCAGGTCTGTGCCAAGTGTTTG |
| 308 | > CRM_SP0256 |
| | ATTGGCATCTTCTATTGCTTTTCCTGGTGACTTCATTTTTCACTCTTGGCTAAAAATGGGTCTCTGATGATTTATTCTATCCTGGGTGTTGACAAGCTGAAGAAGTTGTGTGGGGCCTGCTGCCAGTAACCCTGGGTGACGAAGC |
| | GTGACTCACCACTCCGAGGTCAGTGGGGGGATGGAAGGCAGGGGAGTCAGCTGACAAGATCTGCTGCTTTGTCACCAGGCCTTCTGCCAGGCTTTCACTTTCTCGCCAACTTACAAGGCCTTTCTGTGTAAACAATACCTGAACC |
| | TTTACCCCGTTGCCCGGCAACGGCCAGGTCTGTGCCAAGTGTTTG |
| 309 | > CRM_SP0257 |
| | CAGGCTTTCACTTTCTCGCCAACTTACAAGGCCTTTCTGTGTAAACAATACCTGAACCTTTACCCCGTTGCCCGGCAACGGCCAGGTCTGTGCCAAGTGTTTGGCTGGTTTCTTATAAAACTGATGGAAGATACAAACACTATTA |
| | AAGAACTGTTTGCATGTTGCAAATGATGTCCAAAGTCCAAACATTGTTAATAATTAATACTCCAATAAACATCATGTCAGAATTTCTGTTTTCTTTTCCCTTTGAACCTTTGCAGGATTGCCACATCATCAGGACCACACCTTCA |
| | TCAGGAATGAATAT |
| 310 | > CRM_SP0258 |
| | CTGTTTGCTGCTTGCAATGTTTGCCCATTTTAGGGAGGTTAATTTTTAAAAAGCAGTCAAAAGTCCAAGTGGCCCTTGGCAGCATTTACTCTCTCTGTTTGCTCTGGTTAATAATCTCAGGAGCACAAACATTCCGGCCCGGGAG |
| | GCGCCCTTTGGACCTTTTGCAATCCTGGCGCACTGAACCCTTGACCCCTGCCCTGCAGCCCCCGCAGCTTGCTGTTTGCCCACTCTATTTGCCCAGCCCCAGCCCTGGAGAGTCCTTTAGCAGGGCAAAGTGCAACATAGGCAGA |
| | CCTTAAGGGATGACTCAGTAACAGATAAGCTTTGTGTGCCTGCA |
| 311 | > CRM_SP0259 |
| | CTGTTTGCTGCTTGCAATGTTTGCCCATTTTAGGGGCTGGTTTCTTATAAAACTGATGGAAGATACAAACACTATTAAAGAACTGTTTGCATGTTGCAAATGATGTCCAAAGTCCAAACATTGTTAATAATTAATACTCCAATAA |
| | ACATCATGTCAGAATTTCTGTTTTCTTTTCCCTTTGAACCTTTGCAGGATTGCCACATCATCAGGACCACACCTTCATCAGGAATGAATAT |
| 312 | > CRM_SP0264 |
| | CAGGCTTTCACTTTCTCGCCAACTTACAAGGCCTTTCTGTGTAAACAATACCTGAACCTTTACCCCGTTGCCCGGCAACGGCCAGGTCTGTGCCAAGTGTTTG |
| 313 | > CRM_SP0265 (CRM_LVR_131_A1) |
| | AGGTTAATTTTTAAAAAGCAGTCAAAAGTCCAAGTGGCCCTTGGCAGCATTTACTCTCTCTGTTTGCTCTGGTTAATAATCTCAGGAGCACAAACATTCCTGTACCGGCCCGGGAGGCGCCCTTTGGACCTTTTGCAATCCTGGC |
| | GCACTGAACCCTTGACCCCTGCCCTGCAGCCCCCGCAGCTTGCTGTTTGCCCACTCTATTTGCCCAGCCCCAGCCCTGGAGAGTCCTTTAGCAGGGCAAAGTGCAACATAGGCAGACCTTAAGGGATGACTCAGTAACAGATAAG |
| | CTTTGTGTGCCTGCA |
| 314 | > CRM_SP0266 (CRM_LVR 131_V1) |
| | AAGCAAATATTTGTGGTTATGGATTAACTCGAACTGTTTGCCCACTCTATTTGCCCTGTACCGGCCCGGGAGGCGCCCTTTGGACCTTTTGCAATCCTGGCGCACTGAACCCTTGACCCCTGCCCTGCAGCCCCCGCAGCTTGCT |
| | GTTTGCCCACTCTATTTGCCCAGCCCCAGCCCTGGAGAGTCCTTTAGCAGGGCAAAGTGCAACATAGGCAGACCTTAAGGGATGACTCAGTAACAGATAAGCTTTGTGTGCCTGCA |
| 315 | > CRM_SP0267 (CRM_LVR 131_V2) |
| | GGCGCCCTTTGGACCTTTTGCAATCCTGGAGCAAACAGCAAACACTGTACCGGCCCGGGAGGCGCCCTTTGGACCTTTTGCAATCCTGGCGCACTGAACCCTTGACCCCTGCCCTGCAGCCCCCGCAGCTTGCTGTTTGCCCACT |
| | CTATTTGCCCAGCCCCAGCCCTGGAGAGTCCTTTAGCAGGGCAAAGTGCAACATAGGCAGACCTTAAGGGATGACTCAGTAACAGATAAGCTTTGTGTGCCTGCA |
| 316 | > CRM_SP0268 (CRM_LVR 132_A1) |
| | AGGTTAATTTTTAAAAAGCAGTCAAAAGTCCAAGTGGCCCTTGGCAGCATTTACTCTCTCTGTTTGCTCTGGTTAATAATCTCAGGAGCACAAACATTCCTGTACCAGAATGAACATTGAACTTTGGACTATACCTGAGGGGTGA |
| | GGTAAACAACAGGACTATAAATGGCCCGGGAGGCGCCCTTTGGACCTTTTGCAATCCTGGCGCACTGAACCCTTGACCCCTGCCCTGCAGCCCCCGCAGCTTGCTGTTTGCCCACTCTATTTGCCCAGCCCCAGCCCTGGAGAGT |
| | CCTTTAGCAGGGCAAAGTGCAACATAGGCAGACCTTAAGGGATGACTCAGTAACAGATAAGCTTTGTGTGCCTGCA |
| 317 | > CRM_SP0269 (CRM_LVR_132_V1) |
| | AAGCAAATATTTGTGGTTATGGATTAACTCGAACTGTTTGCCCACTCTATTTGCCCTGTACCAGAATGAACATTGAACTTTGGACTATACCTGAGGGGTGAGGTAAACAACAGGACTATAAATGGCCCGGGAGGCGCCCTTTGGA |
| | CCTTTTGCAATCCTGGCGCACTGAACCCTTGACCCCTGCCCTGCAGCCCCCGCAGCTTGCTGTTTGCCCACTCTATTTGCCCAGCCCCAGCCCTGGAGAGTCCTTTAGCAGGGCAAAGTGCAACATAGGCAGACCTTAAGGGATG |
| | ACTCAGTAACAGATAAGCTTTGTGTGCCTGCA |
| 318 | > CRM_SP0270 (CRM_LVR_132_V2) |
| | GGCGCCCTTTGGACCTTTTGCAATCCTGGAGCAAACAGCAAACACTGTACCAGAATGAACATTGAACTTTGGACTATACCTGAGGGGTGAGGTAAACAACAGGACTATAAATGGCCCGGGAGGCGCCCTTTGGACCTTTTGCAAT |
| | CCTGGCGCACTGAACCCTTGACCCCTGCCCTGCAGCCCCCGCAGCTTGCTGTTTGCCCACTCTATTTGCCCAGCCCCAGCCCTGGAGAGTCCTTTAGCAGGGCAAAGTGCAACATAGGCAGACCTTAAGGGATGACTCAGTAACA |
| | GATAAGCTTTGTGTGCCTGCA |
| 319 | > CRM_SP0271 (CRM_LVR_133_A1) |
| | AGGTTAATTTTTAAAAAGCAGTCAAAAGTCCAAGTGGCCCTTGGCAGCATTTACTCTCTCTGTTTGCTCTGGTTAATAATCTCAGGAGCACAAACATTCCTGTACCAGAATGAACATTGAACTTTGGACTATACCTGAGGGGTGA |
| | GGTAAACAACAGGACTATAAATGGCCCGGGAGGCGCCCTTTGGACCTTTTGCAATCCTGGCG |
| 320 | > CRM_SP0272 (CRM_LVR 133_V1) |
| | AAGCAAATATTTGTGGTTATGGATTAACTCGAACTGTTTGCCCACTCTATTTGCCCTGTACCAGAATGAACATTGAACTTTGGACTATACCTGAGGGGTGAGGTAAACAACAGGACTATAAATGGCCCGGGAGGCGCCCTTTGGA |
| | CCTTTTGCAATCCTGGCG |
| 321 | > CRM_SP0273 (CRM_LVR 133 V2) |
| | GGCGCCCTTTGGACCTTTTGCAATCCTGGAGCAAACAGCAAACACTGTACCAGAATGAACATTGAACTTTGGACTATACCTGAGGGGTGAGGTAAACAACAGGACTATAAATGGCCCGGGAGGCGCCCTTTGGACCTTTTGCAAT |
| | CCTGGCG |
| 322 | > CRM_SP0368 |
| | AGGTTAATTTTTAAAAAGCAGTCAAAAGTCCAAGTGGCCCTTGGCAGCATTTACTCTCTCTGTTTGCTCTGGTTAATAATCTCAGGAGCACAAACATTCC |
| 323 | > CRM_SP0373 |
| | AGGTTAATTTTTAAAAAGCAGTCAAAAGTCCAAGTGGCCCTTGGCAGCATTTACTCTCTCTGTTTGCTCTGGTTAATAATCTCAGGAGCACAAACATTCCTGTACCGGCCCGGGAGGCGCCCTTTGGACCTTTTGCAATCCTGGC |
| | G |
| 324 | > CRM_SP0378 |
| | TGCTCTCTGACAAAGATACGGTGGGTCCCACTGATGAACTGTGCTGCCACAGTAAATGTAGCCACTATGCCTATCTCCATTCTGAAGATGTGCCCTGTTCAAACATGTCCTAATACTCTGTCTCTGCAAGGGTCATCAGTAGTTT |
| | TCCATCTTACTCAACATCCTCCCAGTG |
| 325 | > CRM_SP0379 |
| | CCTCCCCGTGTTCCTGCTCTTTGTCCCTCTGTCCTACTTAGACTAATATTTGCCTTGGGTACTGCAAACAGGAAATGGGGGAGGGACAGGAGTAGGGCGGCCCTGTTCAAACATGTCCTAATACTCTGTCTCTGCAAGGGTCATC |
| | AGTAGTTTTCCATCTTACTCAACATCCTCCCAGTG |
| 326 | > CRM_SP0380 |
| | CCGCCCCCACTGAACCCTTGACCCCTGCCCTGCAGCCCCCGCAGCTTGCTGTTTGCCCACTCTATTTGCCCAGCCCCAGCCCTGTTCAAACATGTCCTAATACTCTGTCTCTGCAAGGGTCATCAGTAGTTTTCCATCTTACTCA |
| | ACATCCTCCCAGTG |
| 327 | > CRM_SP0381 |
| | AAGCTTTCTGAACAGCCAAACAGAGATTCCAAAGTTCAGGCACCAAAGTTCAGACCCTAACAGTTATTTACAAGGGTCAGTTAACCCCTGTTCAAACATGTCCTAATACTCTGTCTCTGCAAGGGTCATCAGTAGTTTTCCATCT |
| | TACTCAACATCCTCCCAGTG |
| 328 | > CRM_SP0384 |
| | AGGTTAATTTTTAAAAAGCAGTCAAAAGTCCAAGTGGCCCTTGGCAGCATTTACTCTCTCTGTTTGCTCTGGTTAATAATCTCAGGAGCACAAACATTCCGGCCCGGGAGGCGCCCTTTGGACCTTTTGCAATCCTGGCG |
| 329 | > CRM_SP0388 |
| | AGGTTAATTTTTAAAAAGCAGTCAAAAGTCCAAGTGGCCCTTGGCAGCATTTACTCTCTCTGTTTGCTCTGGTTAATAATCTCAGGAGCACAAACATTCC |
| 330 | > CRM_SP0396 |
| | AGGTTAATTTTTAAAAAGCAGTCAAAAGTCCAAGTGGCCCTTGGCAGCATTTACTCTCTCTGTTTGCTCTGGTTAATAATCTCAGGAGCACAAACATTCCTGTACCGGCCCGGGAGGCGCCCTTTGGACCTTTTGCAATCCTGGC |
| | GCCCTGGAGAGTCCTTTAGCAGGGCAAAGTGCAACATAGGCAGACCTTAAGGGATGACTCAGTAACAGATAAGCTTTGTGTGCCTGCA |
| 331 | > CRM_SP0397 |
| | AGGTTAATTTTTAAAAAGCAGTCAAAAGTCCAAGTGGCCCTTGGCAGCATTTACTCTCTCTGTTTGCTCTGGTTAATAATCTCAGGAGCACAAACATTCCTGTACCCACTGAACCCTTGACCCCTGCCCTGCAGCCCCCGCAGCT |
| | TGCTGTTTGCCCACTCTATTTGCCCAGCCCCAGCCCTGGAGAGTCCTTTAGCAGGGCAAAGTGCAACATAGGCAGACCTTAAGGGATGACTCAGTAACAGATAAGCTTTGTGTGCCTGCA |
| 332 | > CRM_SP0398 |
| | CAGGCTTTCACTTTCTCGCCAACTTACAAGGCCTTTCTGTGTAAACAATACCTGAACCTTTACCCCGTTGCCCGGCAACGGCCAGGTCTGTGCCAAGTGTTTGAGGTTAATTTTTAAAAAGCAGTCAAAAGTCCAAGTGGCCCTT |
| | GGCAGCATTTACTCTCTCTGTTTGCTCTGGTTAATAATCTCAGGAGCACAAACATTCCTGTACCAGAATGAACATTGAACTTTGGACTATACCTGAGGGGTGAGGTAAACAACAGGACTATAAATGGCCCGGGAGGCGCCCTTTG |
| | GACCTTTTGCAATCCTGGCGCACTGAACCCTTGACCCCTGCCCTGCAGCCCCCGCAGCTTGCTGTTTGCCCACTCTATTTGCCCAGCCCCAGCCCTGGAGAGTCCTTTAGCAGGGCAAAGTGCAACATAGGCAGACCTTAAGGGA |
| | TGACTCAGTAACAGATAAGCTTTGTGTGCCTGCA |
| 333 | > CRM_SP0399 |
| | AGAATGAACATTGAACTTTGGACTATACCTGAGGGGTGAGGTAAACAACAGGACTATAAAT |
| 334 | > CRM_SP0403 |
| | CAGGCTTTCACTTTCTCGCCAACTTACAAGGCCTTTCTGTGTAAACAATACCTGAACCTTTACCCCGTTGCCCGGCAACGGCCAGGTCTGTGCCAAGTGTTTGAAGCAAATATTTGTGGTTATGGATTAACTCGAACTGTTTGCC |
| | CACTCTATTTGCCCTGTACCGGCCCGGGAGGCGCCCTTTGGACCTTTTGCAATCCTGGCGCACTGAACCCTTGACCCCTGCCCTGCAGCCCCCGCAGCTTGCTGTTTGCCCACTCTATTTGCCCAGCCCCAGCCCTGGAGAGTCC |
| | TTTAGCAGGGCAAAGTGCAACATAGGCAGACCTTAAGGGATGACTCAGTAACAGATAAGCTTTGTGTGCCTGCA |
| 335 | > CRM_SP0404 |
| | CAGGCTTTCACTTTCTCGCCAACTTACAAGGCCTTTCTGTGTAAACAATACCTGAACCTTTACCCCGTTGCCCGGCAACGGCCAGGTCTGTGCCAAGTGTTTGAAGCAAATATTTGTGGTTATGGATTAACTCGAACTGTTTGCC |
| | CACTCTATTTGCCCTGTACCAGAATGAACATTGAACTTTGGACTATACCTGAGGGGTGAGGTAAACAACAGGACTATAAATGGCCCGGGAGGCGCCCTTTGGACCTTTTGCAATCCTGGCGCACTGAACCCTTGACCCCTGCCCT |
| | GCAGCCCCCGCAGCTTGCTGTTTGCCCACTCTATTTGCCCAGCCCCAGCCCTGGAGAGTCCTTTAGCAGGGCAAAGTGCAACATAGGCAGACCTTAAGGGATGACTCAGTAACAGATAAGCTTTGTGTGCCTGCA |
| 336 | > CRM_SP0405 |
| | CAGGCTTTCACTTTCTCGCCAACTTACAAGGCCTTTCTGTGTAAACAATACCTGAACCTTTACCCCGTTGCCCGGCAACGGCCAGGTCTGTGCCAAGTGTTTGAAGCAAATATTTGTGGTTATGGATTAACTCGAACTGTTTGCC |
| | CACTCTATTTGCCCTGTACCAGAATGAACATTGAACTTTGGACTATACCTGAGGGGTGAGGTAAACAACAGGACTATAAATGGCCCGGGAGGCGCCCTTTGGACCTTTTGCAATCCTGGCGCACTGAACCCTTGACCCCTGCCCT |
| | GCAGCCCCCGCAGCTTGCTGTTTGCCCACTCTATTTGCCCAGCCCCAG |
| 337 | > CRM_SP0406 |
| | AGGTTAATTTTTAAAAAGCAGTCAAAAGTCCAAGTGGCCCTTGGCAGCATTTACTCTCTCTGTTTGCTCTGGTTAATAATCTCAGGAGCACAAACATTCCGGCCCGGGAGGCGCCCTTTGGACCTTTTGCAATCCTGGCG |
| 338 | > CRM_SP0407 |
| | AGGTTAATTTTTAAAAAGCAGTCAAAAGTCCAAGTGGCCCTTGGCAGCATTTACTCTCTCTGTTTGCTCTGGTTAATAATCTCAGGAGCACAAACATTCCCAGGCTTTCACTTTCTCGCCAACTTACAAGGCCTTTCTGTGTAAA |
| | CAATACCTGAACCTTTACCCCGTTGCCCGGCAACGGCCAGGTCTGTGCCAAGTGTTTG |
| 339 | > CRM_SP0409 |
| | AGGTTAATTTTTAAAAAGCAGTCAAAAGTCCAAGTGGCCCTTGGCAGCATTTACTCTCTCTGTTTGCTCTGGTTAATAATCTCAGGAGCACAAACATTCCCCCTGTTCAAACATGTCCTAATACTCTGTCTCTGCAAGGGTCATC |
| | AGTAGTTTTCCATCTTACTCAACATCCTCCCAGTG |
| 340 | > CRM_SP0411 |
| | CCCTGTTCAAACATGTCCTAATACTCTGTCTCTGCAAGGGTCATCAGTAGTTTTCCATCTTACTCAACATCCTCCCAGTG |
| 86 | > CRM_SP0412 |
| | AGGTTAATTTTTAAAAAGCAGTCAAAAGTCCAAGTGGCCCTTGGCAGCATTTACTCTCTCTGTTTGCTCTGGTTAATAATCTCAGGAGCACAAACATTCCCCCTGTTCAAACATGTCCTAATACTCTGTCTCTGCAAGGGTCATC |
| | AGTAGTTTTCCATCTTACTCAACATCCTCCCAGTG (SEQ ID NO: 186) |
| 341 | > CRM_SP0413 |
| | AGGTTAATTTTTAAAAAGCAGTCAAAAGTCCAAGTGGCCCTTGGCAGCATTTACTCTCTCTGTTTGCTCTGGTTAATAATCTCAGGAGCACAAACATTCCTGTACCGGCCCGGGAGGCGCCCTTTGGACCTTTTGCAATCCTGGC |
| | G |
| 342 | > SP0107 |
| | CCCTGGAGAGTCCTTTAGCAGGGCAAAGTGCAACATAGGCAGACCTTAAGGGATGACTCAGTAACAGATAAGCTTTGTGTGCCTGCAGGGGGATGGGAAGAGGGTGGGGCAGGAGAGGGACATAAAAGGGCTCTGAGGCATTGTA |
| | CTGTGAATTCCTTCAGTCTCCTGTTTGGAGAAGACAGAGCCAATGAGGCCCTCGTTCCAGGGAAACAGAATATGCTCAGCATGACGCAGCACTCCCTGAACTTTCCGGTTACATCACCCAATAGCTGAGATCAGAGGGCATATAA |
| | AACAGGGGCAAGGCACAGACTCATAGCAGAGCAATCACCACCAAGCCTGGAATAACTGCAGCCACC |
| 343 | > SP0109 |
| | CCTGGAGAGTCCTTTAGCAGGGCAAAGTGCAACATAGGCAGACCTTAAGGGATGACTCAGTAACAGATAAGCTTTGTGTGCCTGCAGGGGGATGGGAAGAGGGTGGGGCAGGAGAGGGACATAAAAGGGCTCTGAGGCATTGTAC |
| | TGTGAATTCCTTCAGTCTCCTGCTCTGCTCAGCCAGTCAGCCCTGCCTCCCTTGTTTAGGACCACACAGCACTGCTGGGTGTCTGCCTTTCCTTGGGTAATTTTTTTTTCTGGTTAATATTTAGCAAGAATTCTGCAGAGTGATC |
| | AAAAAAATCAAATACTCAGTATTTCAGAAATAGATTAAATAGGTTACTTTTTTACTGATAATGTGAAAGAATGATATAAAAACTTGATTTTCCTCAACAACATTACTTTCTTTTGTAAATGTGGTTTCTACAAAGATGAAACTAC |
| | TAAAACTTACAGGCCACC |
| 344 | > SP0111 |
| | AGGTTAATTTTTAAAAAGCAGTCAAAAGTCCAAGTGGCCCTTGGCAGCATTTACTCTCTCTGTTTGCTCTGGTTAATAATCTCAGGAGCACAAACATTCCTTTGGAGAAGACAGAGCCAATGAGGCCCTCGTTCCAGGGAAACAG |
| | AATATGCTCAGCATGACGCAGCACTCCCTGAACTTTCCGGTTACATCACCCAATAGCTGAGATCAGAGGGCATATAAAACAGGGGCAAGGCACAGACTCATAGCAGAGCAATCACCACCAAGCCTGGAATAACTGCAGCCACC |
| 345 | > SP0112 |
| | CACTGAACCCTTGACCCCTGCCCTGCAGCCCCCGCAGCTTGCTGTTTGCCCACTCTATTTGCCCAGCCCCAGAGGTTAATTTTTAAAAAGCAGTCAAAAGTCCAAGTGGCCCTTGGCAGCATTTACTCTCTCTGTTTGCTCTGGT |
| | TAATAATCTCAGGAGCACAAACATTCCTTTGGAGAAGACAGAGCCAATGAGGCCCTCGTTCCAGGGAAACAGAATATGCTCAGCATGACGCAGCACTCCCTGAACTTTCCGGTTACATCACCCAATAGCTGAGATCAGAGGGCAT |
| | ATAAAACAGGGGCAAGGCACAGACTCATAGCAGAGCAATCACCACCAAGCCTGGAATAACTGCAGCCACC |
| 346 | > SP0113 |
| | CACTGAACCCTTGACCCCTGCCCTGCAGCCCCCGCAGCTTGCTGTTTGCCCACTCTATTTGCCCAGCCCCAGCCCTGGAGAGTCCTTTAGCAGGGCAAAGTGCAACATAGGCAGACCTTAAGGGATGACTCAGTAACAGATAAGC |
| | TTTGTGTGCCTGCAGGGGGATGGGAAGAGGGTGGGGCAGGAGAGGGACATAAAAGGGCTCTGAGGCATTGTACTGTGAATTCCTTCAGTCTCCTGGGGCATATAAAACAGGGGCAAGGCACAGACTCATAGCAGAGCAATCACCA |
| | CCAAGCCTGGAATAACTGCAGCCACC |
| 347 | > SP0115 |
| | CCCTGGAGAGTCCTTTAGCAGGGCAAAGTGCAACATAGGCAGACCTTAAGGGATGACTCAGTAACAGATAAGCTTTGTGTGCCTGCAGGGGGATGGGAAGAGGGTGGGGCAGGAGAGGGACATAAAAGGGCTCTGAGGCATTGTA |
| | CTGTGAATTCCTTCAGTCTCCTGCTCTGCTCAGCCAGTCAGCCCTGCCTCCCTTGTTTAGGACCACACAGCACTGCTGGGTGTCTGCCTTTCCTTGTGGACTTAGCCCCTGTTTGCTCCTCCGATAACTGGGGTGACCTTGGTTA |
| | ATATTCACCAGCAGCCTCCCCCGTTGCCCCTCTGGATCCACTGCTTAAATACGGACGAGGACAGGGCCCTGTCTCCTCAGCTTCAGGCACCACCACTGACCTGGGACAGTGAATCGCCACC |
| 348 | > SP0116 |
| | CCCTGGAGAGTCCTTTAGCAGGGCAAAGTGCAACATAGGCAGACCTTAAGGGATGACTCAGTAACAGATAAGCTTTGTGTGCCTGCAGGGGGATGGGAAGAGGGTGGGGCAGGAGAGGGACATAAAAGGGCTCTGAGGCATTGTA |
| | CTGTGAATTCCTTCAGTCTCCTGTGGACTTAGCCCCTGTTTGCTCCTCCGATAACTGGGGTGACCTTGGTTAATATTCACCAGCAGCCTCCCCCGTTGCCCCTCTGGATCCACTGCTTAAATACGGACGAGGACAGGGCCCTGTC |
| | TCCTCAGCTTCAGGCACCACCACTGACCTGGGACAGTGAATCGCCACC |
| 349 | > SP0121 |
| | CCCTGGAGAGTCCTTTAGCAGGGCAAAGTGCAACATAGGCAGACCTTAAGGGATGACTCAGTAACAGATAAGCTTTGTGTGCCTGCACCCTGGAGAGTCCTTTAGCAGGGCAAAGTGCAACATAGGCAGACCTTAAGGGATGACT |
| | CAGTAACAGATAAGCTTTGTGTGCCTGCAGGGCATATAAAACAGGGGCAAGGCACAGACTCATAGCAGAGCAATCACCACCAAGCCTGGAATAACTGCAGCCACC |
| 350 | > SP0124 |
| | CACTGAACCCTTGACCCCTGCCCTGCAGCCCCCGCAGCTTGCTGTTTGCCCACTCTATTTGCCCAGCCCCAGCCCTGGAGAGTCCTTTAGCAGGGCAAAGTGCAACATAGGCAGACCTTAAGGGATGACTCAGTAACAGATAAGC |
| | TTTGTGTGCCTGCACTCTTTTGTTTTACATGAAGGGTCTGGCAGCCAAAGCAATCACTCAAAGTTCAAACCTTATCATTTTTTGCTTTGTTCCTCTTGGCCTTGGTTTTGTACATCAGCTTTGAAAATACCATCCCAGGGTTAAT |
| | GCTGGGGTTAATTTATAACTAAGAGTGCTCTAGTTTTGCAATACAGGACATGCTATAAAAATGGAAAGATGTTGCTTTCTGAGAGATGCGCCACC |
| 351 | > SP0127 (LVR_SP127) |
| | AGAATGAACATTGAACTTTGGACTATACCTGAGGGGTGAGGTAAACAACAGGACTATAAATGGCCCGGGAGGCGCCCTTTGGACCTTTTGCAATCCTGGCGCACTGAACCCTTGACCCCTGCCCTGCAGCCCCCGCAGCTTGCTG |
| | TTTGCCCACTCTATTTGCCCAGCCCCAGGGACAGAGCTGATCCTTGAACTCTTAAGTTCCACGGGCATATAAAACAGGGGCAAGGCACAGACTCATAGCAGAGCAATCACCACCAAGCCTGGAATAACTGCAGCCACC |
| 352 | > SP0127A1 (LVR SP127_A1) |
| | AGGTTAATTTTTAAAAAGCAGTCAAAAGTCCAAGTGGCCCTTGGCAGCATTTACTCTCTCTGTTTGCTCTGGTTAATAATCTCAGGAGCACAAACATTCCTGTACCAGAATGAACATTGAACTTTGGACTATACCTGAGGGGTGA |
| | GGTAAACAACAGGACTATAAATGGCCCGGGAGGCGCCCTTTGGACCTTTTGCAATCCTGGCGCACTGAACCCTTGACCCCTGCCCTGCAGCCCCCGCAGCTTGCTGTTTGCCCACTCTATTTGCCCAGCCCCAGGGACAGAGCTG |
| | ATCCTTGAACTCTTAAGTTCCACGGGCATATAAAACAGGGGCAAGGCACAGACTCATAGCAGAGCAATCACCACCAAGCCTGGAATAACTGCAGCCACC |
| 353 | > SP0127V1 (LVR SP127 V1) |
| | AAGCAAATATTTGTGGTTATGGATTAACTCGAACTGTTTGCCCACTCTATTTGCCCTGTACCAGAATGAACATTGAACTTTGGACTATACCTGAGGGGTGAGGTAAACAACAGGACTATAAATGGCCCGGGAGGCGCCCTTTGGA |
| | CCTTTTGCAATCCTGGCGCACTGAACCCTTGACCCCTGCCCTGCAGCCCCCGCAGCTTGCTGTTTGCCCACTCTATTTGCCCAGCCCCAGGGACAGAGCTGATCCTTGAACTCTTAAGTTCCACGGGCATATAAAACAGGGGCAA |
| | GGCACAGACTCATAGCAGAGCAATCACCACCAAGCCTGGAATAACTGCAGCCACC |
| 354 | > SP0127V2 (LVR_SP127_V2) |
| | GGCGCCCTTTGGACCTTTTGCAATCCTGGAGCAAACAGCAAACACTGTACCAGAATGAACATTGAACTTTGGACTATACCTGAGGGGTGAGGTAAACAACAGGACTATAAATGGCCCGGGAGGCGCCCTTTGGACCTTTTGCAAT |
| | CCTGGCGCACTGAACCCTTGACCCCTGCCCTGCAGCCCCCGCAGCTTGCTGTTTGCCCACTCTATTTGCCCAGCCCCAGGGACAGAGCTGATCCTTGAACTCTTAAGTTCCACGGGCATATAAAACAGGGGCAAGGCACAGACTC |
| | ATAGCAGAGCAATCACCACCAAGCCTGGAATAACTGCAGCCACC |
| 355 | > SP0128 |
| | AGAATGAACATTGAACTTTGGACTATACCTGAGGGGTGAGGTAAACAACAGGACTATAAATAGAATGAACATTGAACTTTGGACTATACCTGAGGGGTGAGGTAAACAACAGGACTATAAATCACTGAACCCTTGACCCCTGCCC |
| | TGCAGCCCCCGCAGCTTGCTGTTTGCCCACTCTATTTGCCCAGCCCCAGGGGCATATAAAACAGGGGCAAGGCACAGACTCATAGCAGAGCAATCACCACCAAGCCTGGAATAACTGCAGCCACC |
| 356 | >SP0131 (LVR_SP131) |
| | GGCCCGGGAGGCGCCCTTTGGACCTTTTGCAATCCTGGCGCACTGAACCCTTGACCCCTGCCCTGCAGCCCCCGCAGCTTGCTGTTTGCCCACTCTATTTGCCCAGCCCCAGCCCTGGAGAGTCCTTTAGCAGGGCAAAGTGCAA |
| | CATAGGCAGACCTTAAGGGATGACTCAGTAACAGATAAGCTTTGTGTGCCTGCAGGGCATATAAAACAGGGGCAAGGCACAGACTCATAGCAGAGCAATCACCACCAAGCCTGGAATAACTGCAGCCACC |
| 357 | > SP0132 (LVR_SP132) |
| | AGAATGAACATTGAACTTTGGACTATACCTGAGGGGTGAGGTAAACAACAGGACTATAAATGGCCCGGGAGGCGCCCTTTGGACCTTTTGCAATCCTGGCGCACTGAACCCTTGACCCCTGCCCTGCAGCCCCCGCAGCTTGCTG |
| | TTTGCCCACTCTATTTGCCCAGCCCCAGCCCTGGAGAGTCCTTTAGCAGGGCAAAGTGCAACATAGGCAGACCTTAAGGGATGACTCAGTAACAGATAAGCTTTGTGTGCCTGCAGGGCATATAAAACAGGGGCAAGGCACAGAC |
| | TCATAGCAGAGCAATCACCACCAAGCCTGGAATAACTGCAGCCACC |
| 358 | > SP0133 (LVR_SP133) |
| | AGAATGAACATTGAACTTTGGACTATACCTGAGGGGTGAGGTAAACAACAGGACTATAAATGGCCCGGGAGGCGCCCTTTGGACCTTTTGCAATCCTGGCGCTCTTTTGTTTTACATGAAGGGTCTGGCAGCCAAAGCAATCACT |
| | CAAAGTTCAAACCTTATCATTTTTTGCTTTGTTCCTCTTGGCCTTGGTTTTGTACATCAGCTTTGAAAATACCATCCCAGGGTTAATGCTGGGGTTAATTTATAACTAAGAGTGCTCTAGTTTTGCAATACAGGACATGCTATAA |
| | AAATGGAAAGATGTTGCTTTCTGAGAGATGCGCCACC |
| 359 | > SP0155 |
| | GCTGGTTTCTTATAAAACTGATGGAAGATACAAACACTATTAAAGAACTGTTTGCATGTTGCAAATGATGTCCAAAGTCCAAACATTGTTAATAATTAATACTCCAATAAACATCATGTCAGAATTTCTGTTTTCTTTTCCCTTT |
| | GAACCTTTGCAGGATTGCCACATCATCAGGACCACACCTTCATCAGGAATGAATATCCGATGACCTAATGATTCTGAGCTTGGCAAAGGTCTTATCTCCCAGCTCGCCCAGGCCCAGTGTTCCAGGAATGTGACCTTTGCTGCAG |
| | CAGCCGCTGGAGGGGGCAGAGGGGATGGGCTGGAGGTTGAGCAAACAGAGCAGCAGAAAAGGCAGTTCCTCTTCTCCAGTGCCCTCCTTCCCTGTCTCTGCCTCTCCCTCCCTTCCTCAGGCATCAGAGCGGAGACTTCAGGGAG |
| | ACCAGAGCCCAGCTTGCCAGGCACTGAGCTAGAAGCCCTGCCATG |
| 360 | > SP0158 |
| | ATTGGCATCTTCTATTGCTTTTCCTGGTGACTTCATTTTTCACTCTTGGCTAAAAATGGGTCTCTGATGATTTATTCTATCCTGGGTGTTGACAAGCTGAAGAAGTTGTGTGGGGCCTGCTGCCAGTAACCCTGGGTGACGAAGC |
| | GTGACTCACCACTCCGAGGTCAGTGGGGGGATGGAAGGCAGGGGAGTCAGCTGACAAGATCTGCTGCTTTGTCACCAGGCCTTCTGCCCGATGACCTAATGATTCTGAGCTTGGCAAAGGTCTTATCTCCCAGCTCGCCCAGGCC |
| | CAGTGTTCCAGGAATGTGACCTTTGCTGCAGCAGCCGCTGGAGGGGGCAGAGGGGATGGGCTGGAGGTTGAGCAAACAGAGCAGCAGAAAAGGCAGTTCCTCTTCTCCAGTGCCCTCCTTCCCTGTCTCTGCCTCTCCCTCCCTT |
| | CCTCAGGCATCAGAGCGGAGACTTCAGGGAGACCAGAGCCCAGCTTGCCAGGCACTGAGCTAGAAGCCCTGCCATG |
| 361 | > SP0163 |
| | TGAAATGCCTGCCATATATTAGTGCCCTGAAGTCCAAAGGTAGAGGAACCGAGTGTTTAAAAATTACTGTGGCTGTGGAGTCAACATGATGTAAAAAAACAAACATTTGGATAACACCAAGAAGCCAGATATGGTTGAAATGTTG |
| | ACTGGTTGACAAAAATAATTTGGGTTGCTTAATGGTGCACAAAGGTAATGCAAAACCGATGACCTAATGATTCTGAGCTTGGCAAAGGTCTTATCTCCCAGCTCGCCCAGGCCCAGTGTTCCAGGAATGTGACCTTTGCTGCAGC |
| | AGCCGCTGGAGGGGGCAGAGGGGATGGGCTGGAGGTTGAGCAAACAGAGCAGCAGAAAAGGCAGTTCCTCTTCTCCAGTGCCCTCCTTCCCTGTCTCTGCCTCTCCCTCCCTTCCTCAGGCATCAGAGCGGAGACTTCAGGGAGA |
| | CCAGAGCCCAGCTTGCCAGGCACTGAGCTAGAAGCCCTGCCATG |
| 362 | > SP0236 |
| | CAGGCTTTCACTTTCTCGCCAACTTACAAGGCCTTTCTGTGTAAACAATACCTGAACCTTTACCCCGTTGCCCGGCAACGGCCAGGTCTGTGCCAAGTGTTTGCCTTTGCAACAGCTTATCGGAAGCAAACAAGCTGAGGGGAAT |
| | TGAGCAAGAATTTCTGGGATACCAACAGCATAGGAGGAACAAAGGACGTAGAGGGAGGGTTGACTGTCTACACAGGACAAAGCCAATGATTAACCAAACCTCTTGCAGATTTAAATAGGATGGGAACTAGGAGTGGCAGCAATCC |
| | TTTCTTTCAGCTGGAGTGCTCCTCAGGAGCCAGCCCCACCCTTAGAAAAG |
| 93 | > SP0239 |
| | CAGGCTTTCACTTTCTCGCCAACTTACAAGGCCTTTCTGTGTAAACAATACCTGAACCTTTACCCCGTTGCCCGGCAACGGCCAGGTCTGTGCCAAGTGTTTGAGGTTAATTTTTAAAAAGCAGTCAAAAGTCCAAGTGGCCCTT |
| | GGCAGCATTTACTCTCTCTGTTTGCTCTGGTTAATAATCTCAGGAGCACAAACATTCCGGCCCGGGAGGCGCCCTTTGGACCTTTTGCAATCCTGGCGCACTGAACCCTTGACCCCTGCCCTGCAGCCCCCGCAGCTTGCTGTTT |
| | GCCCACTCTATTTGCCCAGCCCCAGCCCTGGAGAGTCCTTTAGCAGGGCAAAGTGCAACATAGGCAGACCTTAAGGGATGACTCAGTAACAGATAAGCTTTGTGTGCCTGCAGGGCATATAAAACAGGGGCAAGGCACAGACTCA |
| | TAGCAGAGCAATCACCACCAAGCCTGGAATAACTGCAGCCACC |
| 95 | > SP0240 |
| | CAGGCTTTCACTTTCTCGCCAACTTACAAGGCCTTTCTGTGTAAACAATACCTGAACCTTTACCCCGTTGCCCGGCAACGGCCAGGTCTGTGCCAAGTGTTTGCCGATGACCTAATGATTCTGAGCTTGGCAAAGGTCTTATCTC |
| | CCAGCTCGCCCAGGCCCAGTGTTCCAGGAATGTGACCTTTGCTGCAGCAGCCGCTGGAGGGGGCAGAGGGGATGGGCTGGAGGTTGAGCAAACAGAGCAGCAGAAAAGGCAGTTCCTCTTCTCCAGTGCCCTCCTTCCCTGTCTC |
| | TGCCTCTCCCTCCCTTCCTCAGGCATCAGAGCGGAGACTTCAGGGAGACCAGAGCCCAGCTTGCCAGGCACTGAGCTAGAAGCCCTGCC |
| 363 | > SP0241 |
| | AGGTTAATTTTTAAAAAGCAGTCAAAAGTCCAAGTGGCCCTTGGCAGCATTTACTCTCTCTGTTTGCTCTGGTTAATAATCTCAGGAGCACAAACATTCCGGCCCGGGAGGCGCCCTTTGGACCTTTTGCAATCCTGGCGCACTG |
| | AACCCTTGACCCCTGCCCTGCAGCCCCCGCAGCTTGCTGTTTGCCCACTCTATTTGCCCAGCCCCAGCCCTGGAGAGTCCTTTAGCAGGGCAAAGTGCAACATAGGCAGACCTTAAGGGATGACTCAGTAACAGATAAGCTTTGT |
| | GTGCCTGCACCGATGACCTAATGATTCTGAGCTTGGCAAAGGTCTTATCTCCCAGCTCGCCCAGGCCCAGTGTTCCAGGAATGTGACCTTTGCTGCAGCAGCCGCTGGAGGGGGCAGAGGGGATGGGCTGGAGGTTGAGCAAACA |
| | GAGCAGCAGAAAAGGCAGTTCCTCTTCTCCAGTGCCCTCCTTCCCTGTCTCTGCCTCTCCCTCCCTTCCTCAGGCATCAGAGCGGAGACTTCAGGGAGACCAGAGCCCAGCTTGCCAGGCACTGAGCTAGAAGCCCTGCC |
| 364 | > SP0242 |
| | AGGTTAATTTTTAAAAAGCAGTCAAAAGTCCAAGTGGCCCTTGGCAGCATTTACTCTCTCTGTTTGCTCTGGTTAATAATCTCAGGAGCACAAACATTCCGGCCCGGGAGGCGCCCTTTGGACCTTTTGCAATCCTGGCGCACTG |
| | AACCCTTGACCCCTGCCCTGCAGCCCCCGCAGCTTGCTGTTTGCCCACTCTATTTGCCCAGCCCCAGCCGATGACCTAATGATTCTGAGCTTGGCAAAGGTCTTATCTCCCAGCTCGCCCAGGCCCAGTGTTCCAGGAATGTGAC |
| | CTTTGCTGCAGCAGCCGCTGGAGGGGGCAGAGGGGATGGGCTGGAGGTTGAGCAAACAGAGCAGCAGAAAAGGCAGTTCCTCTTCTCCAGTGCCCTCCTTCCCTGTCTCTGCCTCTCCCTCCCTTCCTCAGGCATCAGAGCGGAG |
| | ACTTCAGGGAGACCAGAGCCCAGCTTGCCAGGCACTGAGCTAGAAGCCCTGCC |
| 365 | > SP0243 |
| | TGAAATGCCTGCCATATATTAGTGCCCTGAAGTCCAAAGGTAGAGGAACCGAGTGTTTAAAAATTACTGTGGCTGTGGAGTCAACATGATGTAAAAAAACAAACATTTGGATAACACCAAGAAGCCAGATATGGTTGAAATGTTG |
| | ACTGGTTGACAAAAATAATTTGGGTTGCTTAATGGTGCACAAAGGTAATGCAAAAAGGTTAATTTTTAAAAAGCAGTCAAAAGTCCAAGTGGCCCTTGGCAGCATTTACTCTCTCTGTTTGCTCTGGTTAATAATCTCAGGAGCA |
| | CAAACATTCCGGCCCGGGAGGCGCCCTTTGGACCTTTTGCAATCCTGGCGCACTGAACCCTTGACCCCTGCCCTGCAGCCCCCGCAGCTTGCTGTTTGCCCACTCTATTTGCCCAGCCCCAGCCCTGGAGAGTCCTTTAGCAGGG |
| | CAAAGTGCAACATAGGCAGACCTTAAGGGATGACTCAGTAACAGATAAGCTTTGTGTGCCTGCAGGGCATATAAAACAGGGGCAAGGCACAGACTCATAGCAGAGCAATCACCACCAAGCCTGGAATAACTGCAGCCACC |
| 366 | > SP0244 |
| | AGGTTAATTTTTAAAAAGCAGTCAAAAGTCCAAGTGGCCCTTGGCAGCATTTACTCTCTCTGTTTGCTCTGGTTAATAATCTCAGGAGCACAAACATTCCGGCCCGGGAGGCGCCCTTTGGACCTTTTGCAATCCTGGCGCACTG |
| | AACCCTTGACCCCTGCCCTGCAGCCCCCGCAGCTTGCTGTTTGCCCACTCTATTTGCCCAGCCCCAGTGAAATGCCTGCCATATATTAGTGCCCTGAAGTCCAAAGGTAGAGGAACCGAGTGTTTAAAAATTACTGTGGCTGTGG |
| | AGTCAACATGATGTAAAAAAACAAACATTTGGATAACACCAAGAAGCCAGATATGGTTGAAATGTTGACTGGTTGACAAAAATAATTTGGGTTGCTTAATGGTGCACAAAGGTAATGCAAAACCGATGACCTAATGATTCTGAGC |
| | TTGGCAAAGGTCTTATCTCCCAGCTCGCCCAGGCCCAGTGTTCCAGGAATGTGACCTTTGCTGCAGCAGCCGCTGGAGGGGGCAGAGGGGATGGGCTGGAGGTTGAGCAAACAGAGCAGCAGAAAAGGCAGTTCCTCTTCTCCAG |
| | TGCCCTCCTTCCCTGTCTCTGCCTCTCCCTCCCTTCCTCAGGCATCAGAGCGGAGACTTCAGGGAGACCAGAGCCCAGCTTGCCAGGCACTGAGCTAGAAGCCCTGCC |
| 96 | > SP0246 |
| | AGGTTAATTTTTAAAAAGCAGTCAAAAGTCCAAGTGGCCCTTGGCAGCATTTACTCTCTCTGTTTGCTCTGGTTAATAATCTCAGGAGCACAAACATTCCGGCCCGGGAGGCGCCCTTTGGACCTTTTGCAATCCTGGCGCACTG |
| | AACCCTTGACCCCTGCCCTGCAGCCCCCGCAGCTTGCTGTTTGCCCACTCTATTTGCCCAGCCCCAGGGGCATATAAAACAGGGGCAAGGCACAGACTCATAGCAGAGCAATCACCACCAAGCCTGGAATAACTGCAGCCACC |
| 367 | > SP0247 |
| | GCTGGTTTCTTATAAAACTGATGGAAGATACAAACACTATTAAAGAACTGTTTGCATGTTGCAAATGATGTCCAAAGTCCAAACATTGTTAATAATTAATACTCCAATAAACATCATGTCAGAATTTCTGTTTTCTTTTCCCTTT |
| | GAACCTTTGCAGGATTGCCACATCATCAGGACCACACCTTCATCAGGAATGAATATCAGGCTTTCACTTTCTCGCCAACTTACAAGGCCTTTCTGTGTAAACAATACCTGAACCTTTACCCCGTTGCCCGGCAACGGCCAGGTCT |
| | GTGCCAAGTGTTTGCCGATGACCTAATGATTCTGAGCTTGGCAAAGGTCTTATCTCCCAGCTCGCCCAGGCCCAGTGTTCCAGGAATGTGACCTTTGCTGCAGCAGCCGCTGGAGGGGGCAGAGGGGATGGGCTGGAGGTTGAGC |
| | AAACAGAGCAGCAGAAAAGGCAGTTCCTCTTCTCCAGTGCCCTCCTTCCCTGTCTCTGCCTCTCCCTCCCTTCCTCAGGCATCAGAGCGGAGACTTCAGGGAGACCAGAGCCCAGCTTGCCAGGCACTGAGCTAGAAGCCCTGCC |
| 368 | > SP0248 |
| | AGGTTAATTTTTAAAAAGCAGTCAAAAGTCCAAGTGGCCCTTGGCAGCATTTACTCTCTCTGTTTGCTCTGGTTAATAATCTCAGGAGCACAAACATTCCGGCCCGGGAGGCGCCCTTTGGACCTTTTGCAATCCTGGCGCACTG |
| | AACCCTTGACCCCTGCCCTGCAGCCCCCGCAGCTTGCTGTTTGCCCACTCTATTTGCCCAGCCCCAGCAGGCTTTCACTTTCTCGCCAACTTACAAGGCCTTTCTGTGTAAACAATACCTGAACCTTTACCCCGTTGCCCGGCAA |
| | CGGCCAGGTCTGTGCCAAGTGTTTGGGGCATATAAAACAGGGGCAAGGCACAGACTCATAGCAGAGCAATCACCACCAAGCCTGGAATAACTGCAGCCACC |
| 369 | > SP0249 |
| | AGGTTAATTTTTAAAAAGCAGTCAAAAGTCCAAGTGGCCCTTGGCAGCATTTACTCTCTCTGTTTGCTCTGGTTAATAATCTCAGGAGCACAAACATTCCGGCCCGGGAGGCGCCCTTTGGACCTTTTGCAATCCTGGCGCACTG |
| | AACCCTTGACCCCTGCCCTGCAGCCCCCGCAGCTTGCTGTTTGCCCACTCTATTTGCCCAGCCCCAGCAGGCTTTCACTTTCTCGCCAACTTACAAGGCCTTTCTGTGTAAACAATACCTGAACCTTTACCCCGTTGCCCGGCAA |
| | CGGCCAGGTCTGTGCCAAGTGTTTGGGGCGACTCAGATCCCAGCCAGTGGACTTAGCCCCTGTTTGCTCCTCCGATAACTGGGGTGACCTTGGTTAATATTCACCAGCAGCCTCCCCCGTTGCCCCTCTGGATCCACTGCTTAAA |
| | TACGGACGAGGACAGGGCCCTGTCTCCTCAGCTTCAGGCACCACCACTGACCTGGGACAGTGAATCGCCACC |
| 370 | > SP0250 |
| | AGGTTAATTTTTAAAAAGCAGTCAAAAGTCCAAGTGGCCCTTGGCAGCATTTACTCTCTCTGTTTGCTCTGGTTAATAATCTCAGGAGCACAAACATTCCGGCCCGGGAGGCGCCCTTTGGACCTTTTGCAATCCTGGCGCACTG |
| | AACCCTTGACCCCTGCCCTGCAGCCCCCGCAGCTTGCTGTTTGCCCACTCTATTTGCCCAGCCCCAGGCTGGTTTCTTATAAAACTGATGGAAGATACAAACACTATTAAAGAACTGTTTGCATGTTGCAAATGATGTCCAAAGT |
| | CCAAACATTGTTAATAATTAATACTCCAATAAACATCATGTCAGAATTTCTGTTTTCTTTTCCCTTTGAACCTTTGCAGGATTGCCACATCATCAGGACCACACCTTCATCAGGAATGAATATCCGATGACCTAATGATTCTGAG |
| | CTTGGCAAAGGTCTTATCTCCCAGCTCGCCCAGGCCCAGTGTTCCAGGAATGTGACCTTTGCTGCAGCAGCCGCTGGAGGGGGCAGAGGGGATGGGCTGGAGGTTGAGCAAACAGAGCAGCAGAAAAGGCAGTTCCTCTTCTCCA |
| | GTGCCCTCCTTCCCTGTCTCTGCCTCTCCCTCCCTTCCTCAGGCATCAGAGCGGAGACTTCAGGGAGACCAGAGCCCAGCTTGCCAGGCACTGAGCTAGAAGCCCTGCC |
| 371 | > SP0251 |
| | AGGTTAATTTTTAAAAAGCAGTCAAAAGTCCAAGTGGCCCTTGGCAGCATTTACTCTCTCTGTTTGCTCTGGTTAATAATCTCAGGAGCACAAACATTCCGGCCCGGGAGGCGCCCTTTGGACCTTTTGCAATCCTGGCGCACTG |
| | AACCCTTGACCCCTGCCCTGCAGCCCCCGCAGCTTGCTGTTTGCCCACTCTATTTGCCCAGCCCCAGAAGCAAATATTTGTGGTTATGGATTAACTCGAACTGTTTGCCCACTCTATTTGCCCGGGCATATAAAACAGGGGCAAG |
| | GCACAGACTCATAGCAGAGCAATCACCACCAAGCCTGGAATAACTGCAGCCACC |
| 372 | > SP0252 |
| | AAGCAAATATTTGTGGTTATGGATTAACTCGAACTGTTTGCCCACTCTATTTGCCCCAGGCTTTCACTTTCTCGCCAACTTACAAGGCCTTTCTGTGTAAACAATACCTGAACCTTTACCCCGTTGCCCGGCAACGGCCAGGTCT |
| | GTGCCAAGTGTTTGCCTTTGCAACAGCTTATCGGAAGCAAACAAGCTGAGGGGAATTGAGCAAGAATTTCTGGGATACCAACAGCATAGGAGGAACAAAGGACGTAGAGGGAGGGTTGACTGTCTACACAGGACAAAGCCAATGA |
| | TTAACCAAACCTCTTGCAGATTTAAATAGGATGGGAACTAGGAGTGGCAGCAATCCTTTCTTTCAGCTGGAGTGCTCCTCAGGAGCCAGCCCCACCCTTAGAAAAGCCACC |
| 373 | > SP0253 |
| | AAGCAAATATTTGTGGTTATGGATTAACTCGAACTGTTTGCCCACTCTATTTGCCCCAGGCTTTCACTTTCTCGCCAACTTACAAGGCCTTTCTGTGTAAACAATACCTGAACCTTTACCCCGTTGCCCGGCAACGGCCAGGTCT |
| | GTGCCAAGTGTTTGCCGATGACCTAATGATTCTGAGCTTGGCAAAGGTCTTATCTCCCAGCTCGCCCAGGCCCAGTGTTCCAGGAATGTGACCTTTGCTGCAGCAGCCGCTGGAGGGGGCAGAGGGGATGGGCTGGAGGTTGAGC |
| | AAACAGAGCAGCAGAAAAGGCAGTTCCTCTTCTCCAGTGCCCTCCTTCCCTGTCTCTGCCTCTCCCTCCCTTCCTCAGGCATCAGAGCGGAGACTTCAGGGAGACCAGAGCCCAGCTTGCCAGGCACTGAGCTAGAAGCCCTGCC |
| 374 | > SP0254 |
| | AGGTTAATTTTTAAAAAGCAGTCAAAAGTCCAAGTGGCCCTTGGCAGCATTTACTCTCTCTGTTTGCTCTGGTTAATAATCTCAGGAGCACAAACATTCCGGCCCGGGAGGCGCCCTTTGGACCTTTTGCAATCCTGGCGCAGGC |
| | TTTCACTTTCTCGCCAACTTACAAGGCCTTTCTGTGTAAACAATACCTGAACCTTTACCCCGTTGCCCGGCAACGGCCAGGTCTGTGCCAAGTGTTTGCCTTTGCAACAGCTTATCGGAAGCAAACAAGCTGAGGGGAATTGAGC |
| | AAGAATTTCTGGGATACCAACAGCATAGGAGGAACAAAGGACGTAGAGGGAGGGTTGACTGTCTACACAGGACAAAGCCAATGATTAACCAAACCTCTTGCAGATTTAAATAGGATGGGAACTAGGAGTGGCAGCAATCCTTTCT |
| | TTCAGCTGGAGTGCTCCTCAGGAGCCAGCCCCACCCTTAGAAAAGCCACC |
| 375 | > SP0255 |
| | AGGTTAATTTTTAAAAAGCAGTCAAAAGTCCAAGTGGCCCTTGGCAGCATTTACTCTCTCTGTTTGCTCTGGTTAATAATCTCAGGAGCACAAACATTCCGGCCCGGGAGGCGCCCTTTGGACCTTTTGCAATCCTGGCGCAGGC |
| | TTTCACTTTCTCGCCAACTTACAAGGCCTTTCTGTGTAAACAATACCTGAACCTTTACCCCGTTGCCCGGCAACGGCCAGGTCTGTGCCAAGTGTTTGCCGATGACCTAATGATTCTGAGCTTGGCAAAGGTCTTATCTCCCAGC |
| | TCGCCCAGGCCCAGTGTTCCAGGAATGTGACCTTTGCTGCAGCAGCCGCTGGAGGGGGCAGAGGGGATGGGCTGGAGGTTGAGCAAACAGAGCAGCAGAAAAGGCAGTTCCTCTTCTCCAGTGCCCTCCTTCCCTGTCTCTGCCT |
| | CTCCCTCCCTTCCTCAGGCATCAGAGCGGAGACTTCAGGGAGACCAGAGCCCAGCTTGCCAGGCACTGAGCTAGAAGCCCTGCC |
| 376 | > SP0256 |
| | ATTGGCATCTTCTATTGCTTTTCCTGGTGACTTCATTTTTCACTCTTGGCTAAAAATGGGTCTCTGATGATTTATTCTATCCTGGGTGTTGACAAGCTGAAGAAGTTGTGTGGGGCCTGCTGCCAGTAACCCTGGGTGACGAAGC |
| | GTGACTCACCACTCCGAGGTCAGTGGGGGGATGGAAGGCAGGGGAGTCAGCTGACAAGATCTGCTGCTTTGTCACCAGGCCTTCTGCCAGGCTTTCACTTTCTCGCCAACTTACAAGGCCTTTCTGTGTAAACAATACCTGAACC |
| | TTTACCCCGTTGCCCGGCAACGGCCAGGTCTGTGCCAAGTGTTTGCCGATGACCTAATGATTCTGAGCTTGGCAAAGGTCTTATCTCCCAGCTCGCCCAGGCCCAGTGTTCCAGGAATGTGACCTTTGCTGCAGCAGCCGCTGGA |
| | GGGGGCAGAGGGGATGGGCTGGAGGTTGAGCAAACAGAGCAGCAGAAAAGGCAGTTCCTCTTCTCCAGTGCCCTCCTTCCCTGTCTCTGCCTCTCCCTCCCTTCCTCAGGCATCAGAGCGGAGACTTCAGGGAGACCAGAGCCCA |
| | GCTTGCCAGGCACTGAGCTAGAAGCCCTGCC |
| 377 | > SP0257 |
| | CAGGCTTTCACTTTCTCGCCAACTTACAAGGCCTTTCTGTGTAAACAATACCTGAACCTTTACCCCGTTGCCCGGCAACGGCCAGGTCTGTGCCAAGTGTTTGGCTGGTTTCTTATAAAACTGATGGAAGATACAAACACTATTA |
| | AAGAACTGTTTGCATGTTGCAAATGATGTCCAAAGTCCAAACATTGTTAATAATTAATACTCCAATAAACATCATGTCAGAATTTCTGTTTTCTTTTCCCTTTGAACCTTTGCAGGATTGCCACATCATCAGGACCACACCTTCA |
| | TCAGGAATGAATATCCGATGACCTAATGATTCTGAGCTTGGCAAAGGTCTTATCTCCCAGCTCGCCCAGGCCCAGTGTTCCAGGAATGTGACCTTTGCTGCAGCAGCCGCTGGAGGGGGCAGAGGGGATGGGCTGGAGGTTGAGC |
| | AAACAGAGCAGCAGAAAAGGCAGTTCCTCTTCTCCAGTGCCCTCCTTCCCTGTCTCTGCCTCTCCCTCCCTTCCTCAGGCATCAGAGCGGAGACTTCAGGGAGACCAGAGCCCAGCTTGCCAGGCACTGAGCTAGAAGCCCTGCC |
| 378 | > SP0258 |
| | CTGTTTGCTGCTTGCAATGTTTGCCCATTTTAGGGAGGTTAATTTTTAAAAAGCAGTCAAAAGTCCAAGTGGCCCTTGGCAGCATTTACTCTCTCTGTTTGCTCTGGTTAATAATCTCAGGAGCACAAACATTCCGGCCCGGGAG |
| | GCGCCCTTTGGACCTTTTGCAATCCTGGCGCACTGAACCCTTGACCCCTGCCCTGCAGCCCCCGCAGCTTGCTGTTTGCCCACTCTATTTGCCCAGCCCCAGCCCTGGAGAGTCCTTTAGCAGGGCAAAGTGCAACATAGGCAGA |
| | CCTTAAGGGATGACTCAGTAACAGATAAGCTTTGTGTGCCTGCAGGGCATATAAAACAGGGGCAAGGCACAGACTCATAGCAGAGCAATCACCACCAAGCCTGGAATAACTGCAGCCACC |
| 379 | > SP0259 |
| | CTGTTTGCTGCTTGCAATGTTTGCCCATTTTAGGGGCTGGTTTCTTATAAAACTGATGGAAGATACAAACACTATTAAAGAACTGTTTGCATGTTGCAAATGATGTCCAAAGTCCAAACATTGTTAATAATTAATACTCCAATAA |
| | ACATCATGTCAGAATTTCTGTTTTCTTTTCCCTTTGAACCTTTGCAGGATTGCCACATCATCAGGACCACACCTTCATCAGGAATGAATATCCGATGACCTAATGATTCTGAGCTTGGCAAAGGTCTTATCTCCCAGCTCGCCCA |
| | GGCCCAGTGTTCCAGGAATGTGACCTTTGCTGCAGCAGCCGCTGGAGGGGGCAGAGGGGATGGGCTGGAGGTTGAGCAAACAGAGCAGCAGAAAAGGCAGTTCCTCTTCTCCAGTGCCCTCCTTCCCTGTCTCTGCCTCTCCCTC |
| | CCTTCCTCAGGCATCAGAGCGGAGACTTCAGGGAGACCAGAGCCCAGCTTGCCAGGCACTGAGCTAGAAGCCCTGCC |
| 380 | > SP0264 |
| | CAGGCTTTCACTTTCTCGCCAACTTACAAGGCCTTTCTGTGTAAACAATACCTGAACCTTTACCCCGTTGCCCGGCAACGGCCAGGTCTGTGCCAAGTGTTTGCCTTTGCAACAGCTTATCGGAAGCAAACAAGCTGAGGGGAAT |
| | TGAGCAAGAATTTCTGGGATACCAACAGCATAGGAGGAACAAAGGACGTAGAGGGAGGGTTGACTGTCTACACAGGACAAAGCCAATGATTAACCAAACCTCTTGCAGATTTAAATAGGATGGGAACTAGGAGTGGCAGCAATCC |
| | TTTCTTTCAGCTGGAGTGCTCCTCAGGagCCAGCCCCACCCTTAGAAAAGCCACC |
| 94 | > SP0265 (LVR_SP131_A1) |
| | AGGTTAATTTTTAAAAAGCAGTCAAAAGTCCAAGTGGCCCTTGGCAGCATTTACTCTCTCTGTTTGCTCTGGTTAATAATCTCAGGAGCACAAACATTCCTGTACCGGCCCGGGAGGCGCCCTTTGGACCTTTTGCAATCCTGGC |
| | GCACTGAACCCTTGACCCCTGCCCTGCAGCCCCCGCAGCTTGCTGTTTGCCCACTCTATTTGCCCAGCCCCAGCCCTGGAGAGTCCTTTAGCAGGGCAAAGTGCAACATAGGCAGACCTTAAGGGATGACTCAGTAACAGATAAG |
| | CTTTGTGTGCCTGCAGGGCATATAAAACAGGGGCAAGGCACAGACTCATAGCAGAGCAATCACCACCAAGCCTGGAATAACTGCAGCCACC |
| 381 | > SP0266 (LVR_SP131 V1) |
| | AAGCAAATATTTGTGGTTATGGATTAACTCGAACTGTTTGCCCACTCTATTTGCCCTGTACCGGCCCGGGAGGCGCCCTTTGGACCTTTTGCAATCCTGGCGCACTGAACCCTTGACCCCTGCCCTGCAGCCCCCGCAGCTTGCT |
| | GTTTGCCCACTCTATTTGCCCAGCCCCAGCCCTGGAGAGTCCTTTAGCAGGGCAAAGTGCAACATAGGCAGACCTTAAGGGATGACTCAGTAACAGATAAGCTTTGTGTGCCTGCAGGGCATATAAAACAGGGGCAAGGCACAGA |
| | CTCATAGCAGAGCAATCACCACCAAGCCTGGAATAACTGCAGCCACC |
| 382 | > SP0267 (LVR_SP131_V2) |
| | GGCGCCCTTTGGACCTTTTGCAATCCTGGAGCAAACAGCAAACACTGTACCGGCCCGGGAGGCGCCCTTTGGACCTTTTGCAATCCTGGCGCACTGAACCCTTGACCCCTGCCCTGCAGCCCCCGCAGCTTGCTGTTTGCCCACT |
| | CTATTTGCCCAGCCCCAGCCCTGGAGAGTCCTTTAGCAGGGCAAAGTGCAACATAGGCAGACCTTAAGGGATGACTCAGTAACAGATAAGCTTTGTGTGCCTGCAGGGCATATAAAACAGGGGCAAGGCACAGACTCATAGCAGA |
| | GCAATCACCACCAAGCCTGGAATAACTGCAGCCACC |
| 383 | > SP0268 (LVR 132_A1) |
| | AGGTTAATTTTTAAAAAGCAGTCAAAAGTCCAAGTGGCCCTTGGCAGCATTTACTCTCTCTGTTTGCTCTGGTTAATAATCTCAGGAGCACAAACATTCCTGTACCAGAATGAACATTGAACTTTGGACTATACCTGAGGGGTGA |
| | GGTAAACAACAGGACTATAAATGGCCCGGGAGGCGCCCTTTGGACCTTTTGCAATCCTGGCGCACTGAACCCTTGACCCCTGCCCTGCAGCCCCCGCAGCTTGCTGTTTGCCCACTCTATTTGCCCAGCCCCAGCCCTGGAGAGT |
| | CCTTTAGCAGGGCAAAGTGCAACATAGGCAGACCTTAAGGGATGACTCAGTAACAGATAAGCTTTGTGTGCCTGCAGGGCATATAAAACAGGGGCAAGGCACAGACTCATAGCAGAGCAATCACCACCAAGCCTGGAATAACTGC |
| | AGCCACC |
| 384 | > SP0269 (LVR_132_V1) |
| | AAGCAAATATTTGTGGTTATGGATTAACTCGAACTGTTTGCCCACTCTATTTGCCCTGTACCAGAATGAACATTGAACTTTGGACTATACCTGAGGGGTGAGGTAAACAACAGGACTATAAATGGCCCGGGAGGCGCCCTTTGGA |
| | CCTTTTGCAATCCTGGCGCACTGAACCCTTGACCCCTGCCCTGCAGCCCCCGCAGCTTGCTGTTTGCCCACTCTATTTGCCCAGCCCCAGCCCTGGAGAGTCCTTTAGCAGGGCAAAGTGCAACATAGGCAGACCTTAAGGGATG |
| | ACTCAGTAACAGATAAGCTTTGTGTGCCTGCAGGGCATATAAAACAGGGGCAAGGCACAGACTCATAGCAGAGCAATCACCACCAAGCCTGGAATAACTGCAGCCACC |
| 385 | > SP0270 (LVR_132_V2) |
| | GGCGCCCTTTGGACCTTTTGCAATCCTGGAGCAAACAGCAAACACTGTACCAGAATGAACATTGAACTTTGGACTATACCTGAGGGGTGAGGTAAACAACAGGACTATAAATGGCCCGGGAGGCGCCCTTTGGACCTTTTGCAAT |
| | CCTGGCGCACTGAACCCTTGACCCCTGCCCTGCAGCCCCCGCAGCTTGCTGTTTGCCCACTCTATTTGCCCAGCCCCAGCCCTGGAGAGTCCTTTAGCAGGGCAAAGTGCAACATAGGCAGACCTTAAGGGATGACTCAGTAACA |
| | GATAAGCTTTGTGTGCCTGCAGGGCATATAAAACAGGGGCAAGGCACAGACTCATAGCAGAGCAATCACCACCAAGCCTGGAATAACTGCAGCCACC |
| 386 | > SP0271 (LVR 133_A1) |
| | AGGTTAATTTTTAAAAAGCAGTCAAAAGTCCAAGTGGCCCTTGGCAGCATTTACTCTCTCTGTTTGCTCTGGTTAATAATCTCAGGAGCACAAACATTCCTGTACCAGAATGAACATTGAACTTTGGACTATACCTGAGGGGTGA |
| | GGTAAACAACAGGACTATAAATGGCCCGGGAGGCGCCCTTTGGACCTTTTGCAATCCTGGCGCTCTTTTGTTTTACATGAAGGGTCTGGCAGCCAAAGCAATCACTCAAAGTTCAAACCTTATCATTTTTTGCTTTGTTCCTCTT |
| | GGCCTTGGTTTTGTACATCAGCTTTGAAAATACCATCCCAGGGTTAATGCTGGGGTTAATTTATAACTAAGAGTGCTCTAGTTTTGCAATACAGGACATGCTATAAAAATGGAAAGATGTTGCTTTCTGAGAGATGCGCCACC |
| 387 | > SP0272 (LVR 133_V1) |
| | AAGCAAATATTTGTGGTTATGGATTAACTCGAACTGTTTGCCCACTCTATTTGCCCTGTACCAGAATGAACATTGAACTTTGGACTATACCTGAGGGGTGAGGTAAACAACAGGACTATAAATGGCCCGGGAGGCGCCCTTTGGA |
| | CCTTTTGCAATCCTGGCGCTCTTTTGTTTTACATGAAGGGTCTGGCAGCCAAAGCAATCACTCAAAGTTCAAACCTTATCATTTTTTGCTTTGTTCCTCTTGGCCTTGGTTTTGTACATCAGCTTTGAAAATACCATCCCAGGGT |
| | TAATGCTGGGGTTAATTTATAACTAAGAGTGCTCTAGTTTTGCAATACAGGACATGCTATAAAAATGGAAAGATGTTGCTTTCTGAGAGATGCGCCACC |
| 388 | > SP0273 (LVR_133_V2) |
| | GGCGCCCTTTGGACCTTTTGCAATCCTGGAGCAAACAGCAAACACTGTACCAGAATGAACATTGAACTTTGGACTATACCTGAGGGGTGAGGTAAACAACAGGACTATAAATGGCCCGGGAGGCGCCCTTTGGACCTTTTGCAAT |
| | CCTGGCGCTCTTTTGTTTTACATGAAGGGTCTGGCAGCCAAAGCAATCACTCAAAGTTCAAACCTTATCATTTTTTGCTTTGTTCCTCTTGGCCTTGGTTTTGTACATCAGCTTTGAAAATACCATCCCAGGGTTAATGCTGGGG |
| | TTAATTTATAACTAAGAGTGCTCTAGTTTTGCAATACAGGACATGCTATAAAAATGGAAAGATGTTGCTTTCTGAGAGATGCGCCACC |
| 389 | > SP0256 |
| | ATTGGCATCTTCTATTGCTTTTCCTGGTGACTTCATTTTTCACTCTTGGCTAAAAATGGGTCTCTGATGATTTATTCTATCCTGGGTGTTGACAAGCTGAAGAAGTTGTGTGGGGCCTGCTGCCAGTAACCCTGGGTGACGAAGC |
| | GTGACTCACCACTCCGAGGTCAGTGGGGGGATGGAAGGCAGGGGAGTCAGCTGACAAGATCTGCTGCTTTGTCACCAGGCCTTCTGCCAGGCTTTCACTTTCTCGCCAACTTACAAGGCCTTTCTGTGTAAACAATACCTGAACC |
| | TTTACCCCGTTGCCCGGCAACGGCCAGGTCTGTGCCAAGTGTTTGCCGATGACCTAATGATTCTGAGCTTGGCAAAGGTCTTATCTCCCAGCTCGCCCAGGCCCAGTGTTCCAGGAATGTGACCTTTGCTGCAGCAGCCGCTGGA |
| | GGGGGCAGAGGGGATGGGCTGGAGGTTGAGCAAACAGAGCAGCAGAAAAGGCAGTTCCTCTTCTCCAGTGCCCTCCTTCCCTGTCTCTGCCTCTCCCTCCCTTCCTCAGGCATCAGAGCGGAGACTTCAGGGAGACCAGAGCCCA |
| | GCTTGCCAGGCACTGAGCTAGAAGCCCTGCC |
| 390 | > SP0257 |
| | CAGGCTTTCACTTTCTCGCCAACTTACAAGGCCTTTCTGTGTAAACAATACCTGAACCTTTACCCCGTTGCCCGGCAACGGCCAGGTCTGTGCCAAGTGTTTGGCTGGTTTCTTATAAAACTGATGGAAGATACAAACACTATTA |
| | AAGAACTGTTTGCATGTTGCAAATGATGTCCAAAGTCCAAACATTGTTAATAATTAATACTCCAATAAACATCATGTCAGAATTTCTGTTTTCTTTTCCCTTTGAACCTTTGCAGGATTGCCACATCATCAGGACCACACCTTCA |
| | TCAGGAATGAATATCCGATGACCTAATGATTCTGAGCTTGGCAAAGGTCTTATCTCCCAGCTCGCCCAGGCCCAGTGTTCCAGGAATGTGACCTTTGCTGCAGCAGCCGCTGGAGGGGGCAGAGGGGATGGGCTGGAGGTTGAGC |
| | AAACAGAGCAGCAGAAAAGGCAGTTCCTCTTCTCCAGTGCCCTCCTTCCCTGTCTCTGCCTCTCCCTCCCTTCCTCAGGCATCAGAGCGGAGACTTCAGGGAGACCAGAGCCCAGCTTGCCAGGCACTGAGCTAGAAGCCCTGCC |
| 391 | > SP0258 |
| | CTGTTTGCTGCTTGCAATGTTTGCCCATTTTAGGGAGGTTAATTTTTAAAAAGCAGTCAAAAGTCCAAGTGGCCCTTGGCAGCATTTACTCTCTCTGTTTGCTCTGGTTAATAATCTCAGGAGCACAAACATTCCGGCCCGGGAG |
| | GCGCCCTTTGGACCTTTTGCAATCCTGGCGCACTGAACCCTTGACCCCTGCCCTGCAGCCCCCGCAGCTTGCTGTTTGCCCACTCTATTTGCCCAGCCCCAGCCCTGGAGAGTCCTTTAGCAGGGCAAAGTGCAACATAGGCAGA |
| | CCTTAAGGGATGACTCAGTAACAGATAAGCTTTGTGTGCCTGCAGGGCATATAAAACAGGGGCAAGGCACAGACTCATAGCAGAGCAATCACCACCAAGCCTGGAATAACTGCAGCCACC |
| 392 | > SP0259 |
| | CTGTTTGCTGCTTGCAATGTTTGCCCATTTTAGGGGCTGGTTTCTTATAAAACTGATGGAAGATACAAACACTATTAAAGAACTGTTTGCATGTTGCAAATGATGTCCAAAGTCCAAACATTGTTAATAATTAATACTCCAATAA |
| | ACATCATGTCAGAATTTCTGTTTTCTTTTCCCTTTGAACCTTTGCAGGATTGCCACATCATCAGGACCACACCTTCATCAGGAATGAATATCCGATGACCTAATGATTCTGAGCTTGGCAAAGGTCTTATCTCCCAGCTCGCCCA |
| | GGCCCAGTGTTCCAGGAATGTGACCTTTGCTGCAGCAGCCGCTGGAGGGGGCAGAGGGGATGGGCTGGAGGTTGAGCAAACAGAGCAGCAGAAAAGGCAGTTCCTCTTCTCCAGTGCCCTCCTTCCCTGTCTCTGCCTCTCCCTC |
| | CCTTCCTCAGGCATCAGAGCGGAGACTTCAGGGAGACCAGAGCCCAGCTTGCCAGGCACTGAGCTAGAAGCCCTGCC |
| 393 | > SP0264 |
| | CAGGCTTTCACTTTCTCGCCAACTTACAAGGCCTTTCTGTGTAAACAATACCTGAACCTTTACCCCGTTGCCCGGCAACGGCCAGGTCTGTGCCAAGTGTTTGCCTTTGCAACAGCTTATCGGAAGCAAACAAGCTGAGGGGAAT |
| | TGAGCAAGAATTTCTGGGATACCAACAGCATAGGAGGAACAAAGGACGTAGAGGGAGGGTTGACTGTCTACACAGGACAAAGCCAATGATTAACCAAACCTCTTGCAGATTTAAATAGGATGGGAACTAGGAGTGGCAGCAATCC |
| | TTTCTTTCAGCTGGAGTGCTCCTCAGGAGCCAGCCCCACCCTTAGAAAAGCCACC |
| 394 | >SP0265 (LVR_SP131_A1) |
| | AGGTTAATTTTTAAAAAGCAGTCAAAAGTCCAAGTGGCCCTTGGCAGCATTTACTCTCTCTGTTTGCTCTGGTTAATAATCTCAGGAGCACAAACATTCCTGTACCGGCCCGGGAGGCGCCCTTTGGACCTTTTGCAATCCTGGC |
| | GCACTGAACCCTTGACCCCTGCCCTGCAGCCCCCGCAGCTTGCTGTTTGCCCACTCTATTTGCCCAGCCCCAGCCCTGGAGAGTCCTTTAGCAGGGCAAAGTGCAACATAGGCAGACCTTAAGGGATGACTCAGTAACAGATAAG |
| | CTTTGTGTGCCTGCAGGGCATATAAAACAGGGGCAAGGCACAGACTCATAGCAGAGCAATCACCACCAAGCCTGGAATAACTGCAGCCACC |
| 395 | > SP0266 (LVR SP131 V1) |
| | AAGCAAATATTTGTGGTTATGGATTAACTCGAACTGTTTGCCCACTCTATTTGCCCTGTACCGGCCCGGGAGGCGCCCTTTGGACCTTTTGCAATCCTGGCGCACTGAACCCTTGACCCCTGCCCTGCAGCCCCCGCAGCTTGCT |
| | GTTTGCCCACTCTATTTGCCCAGCCCCAGCCCTGGAGAGTCCTTTAGCAGGGCAAAGTGCAACATAGGCAGACCTTAAGGGATGACTCAGTAACAGATAAGCTTTGTGTGCCTGCAGGGCATATAAAACAGGGGCAAGGCACAGA |
| | CTCATAGCAGAGCAATCACCACCAAGCCTGGAATAACTGCAGCCACC |
| 396 | > SP0267 (LVR_SP131_V2) |
| | GGCGCCCTTTGGACCTTTTGCAATCCTGGAGCAAACAGCAAACACTGTACCGGCCCGGGAGGCGCCCTTTGGACCTTTTGCAATCCTGGCGCACTGAACCCTTGACCCCTGCCCTGCAGCCCCCGCAGCTTGCTGTTTGCCCACT |
| | CTATTTGCCCAGCCCCAGCCCTGGAGAGTCCTTTAGCAGGGCAAAGTGCAACATAGGCAGACCTTAAGGGATGACTCAGTAACAGATAAGCTTTGTGTGCCTGCAGGGCATATAAAACAGGGGCAAGGCACAGACTCATAGCAGA |
| | GCAATCACCACCAAGCCTGGAATAACTGCAGCCACC |
| 397 | > SP0268 (LVR_132_A1) |
| | AGGTTAATTTTTAAAAAGCAGTCAAAAGTCCAAGTGGCCCTTGGCAGCATTTACTCTCTCTGTTTGCTCTGGTTAATAATCTCAGGAGCACAAACATTCCTGTACCAGAATGAACATTGAACTTTGGACTATACCTGAGGGGTGA |
| | GGTAAACAACAGGACTATAAATGGCCCGGGAGGCGCCCTTTGGACCTTTTGCAATCCTGGCGCACTGAACCCTTGACCCCTGCCCTGCAGCCCCCGCAGCTTGCTGTTTGCCCACTCTATTTGCCCAGCCCCAGCCCTGGAGAGT |
| | CCTTTAGCAGGGCAAAGTGCAACATAGGCAGACCTTAAGGGATGACTCAGTAACAGATAAGCTTTGTGTGCCTGCAGGGCATATAAAACAGGGGCAAGGCACAGACTCATAGCAGAGCAATCACCACCAAGCCTGGAATAACTGC |
| | AGCCACC |
| 398 | > SP0269 (LVR_132_V1) |
| | AAGCAAATATTTGTGGTTATGGATTAACTCGAACTGTTTGCCCACTCTATTTGCCCTGTACCAGAATGAACATTGAACTTTGGACTATACCTGAGGGGTGAGGTAAACAACAGGACTATAAATGGCCCGGGAGGCGCCCTTTGGA |
| | CCTTTTGCAATCCTGGCGCACTGAACCCTTGACCCCTGCCCTGCAGCCCCCGCAGCTTGCTGTTTGCCCACTCTATTTGCCCAGCCCCAGCCCTGGAGAGTCCTTTAGCAGGGCAAAGTGCAACATAGGCAGACCTTAAGGGATG |
| | ACTCAGTAACAGATAAGCTTTGTGTGCCTGCAGGGCATATAAAACAGGGGCAAGGCACAGACTCATAGCAGAGCAATCACCACCAAGCCTGGAATAACTGCAGCCACC |
| 399 | > SP0270 (LVR 132_V2) |
| | GGCGCCCTTTGGACCTTTTGCAATCCTGGAGCAAACAGCAAACACTGTACCAGAATGAACATTGAACTTTGGACTATACCTGAGGGGTGAGGTAAACAACAGGACTATAAATGGCCCGGGAGGCGCCCTTTGGACCTTTTGCAAT |
| | CCTGGCGCACTGAACCCTTGACCCCTGCCCTGCAGCCCCCGCAGCTTGCTGTTTGCCCACTCTATTTGCCCAGCCCCAGCCCTGGAGAGTCCTTTAGCAGGGCAAAGTGCAACATAGGCAGACCTTAAGGGATGACTCAGTAACA |
| | GATAAGCTTTGTGTGCCTGCAGGGCATATAAAACAGGGGCAAGGCACAGACTCATAGCAGAGCAATCACCACCAAGCCTGGAATAACTGCAGCCACC |
| 400 | > SP0271 (LVR 133_A1) |
| | AGGTTAATTTTTAAAAAGCAGTCAAAAGTCCAAGTGGCCCTTGGCAGCATTTACTCTCTCTGTTTGCTCTGGTTAATAATCTCAGGAGCACAAACATTCCTGTACCAGAATGAACATTGAACTTTGGACTATACCTGAGGGGTGA |
| | GGTAAACAACAGGACTATAAATGGCCCGGGAGGCGCCCTTTGGACCTTTTGCAATCCTGGCGCTCTTTTGTTTTACATGAAGGGTCTGGCAGCCAAAGCAATCACTCAAAGTTCAAACCTTATCATTTTTTGCTTTGTTCCTCTT |
| | GGCCTTGGTTTTGTACATCAGCTTTGAAAATACCATCCCAGGGTTAATGCTGGGGTTAATTTATAACTAAGAGTGCTCTAGTTTTGCAATACAGGACATGCTATAAAAATGGAAAGATGTTGCTTTCTGAGAGATGCGCCACC |
| 401 | > SP0272 (LVR_133_V1) |
| | AAGCAAATATTTGTGGTTATGGATTAACTCGAACTGTTTGCCCACTCTATTTGCCCTGTACCAGAATGAACATTGAACTTTGGACTATACCTGAGGGGTGAGGTAAACAACAGGACTATAAATGGCCCGGGAGGCGCCCTTTGGA |
| | CCTTTTGCAATCCTGGCGCTCTTTTGTTTTACATGAAGGGTCTGGCAGCCAAAGCAATCACTCAAAGTTCAAACCTTATCATTTTTTGCTTTGTTCCTCTTGGCCTTGGTTTTGTACATCAGCTTTGAAAATACCATCCCAGGGT |
| | TAATGCTGGGGTTAATTTATAACTAAGAGTGCTCTAGTTTTGCAATACAGGACATGCTATAAAAATGGAAAGATGTTGCTTTCTGAGAGATGCGCCACC |
| 402 | > SP0273 (LVR_133_V2) |
| | GGCGCCCTTTGGACCTTTTGCAATCCTGGAGCAAACAGCAAACACTGTACCAGAATGAACATTGAACTTTGGACTATACCTGAGGGGTGAGGTAAACAACAGGACTATAAATGGCCCGGGAGGCGCCCTTTGGACCTTTTGCAAT |
| | CCTGGCGCTCTTTTGTTTTACATGAAGGGTCTGGCAGCCAAAGCAATCACTCAAAGTTCAAACCTTATCATTTTTTGCTTTGTTCCTCTTGGCCTTGGTTTTGTACATCAGCTTTGAAAATACCATCCCAGGGTTAATGCTGGGG |
| | TTAATTTATAACTAAGAGTGCTCTAGTTTTGCAATACAGGACATGCTATAAAAATGGAAAGATGTTGCTTTCTGAGAGATGCGCCACC |
| 403 | > SP0368 |
| | AGGTTAATTTTTAAAAAGCAGTCAAAAGTCCAAGTGGCCCTTGGCAGCATTTACTCTCTCTGTTTGCTCTGGTTAATAATCTCAGGAGCACAAACATTCCAGTCATATGTTTGCTCACTGAAGGTTACTAGTTAACAGGCATCCC |
| | TTAAACAGGATATAAAAGGACTTCAGCAGGACTGCTCGAAACATCCCACTCAGCCACC |
| 404 | > SP0373 |
| | AGGTTAATTTTTAAAAAGCAGTCAAAAGTCCAAGTGGCCCTTGGCAGCATTTACTCTCTCTGTTTGCTCTGGTTAATAATCTCAGGAGCACAAACATTCCTGTACCGGCCCGGGAGGCGCCCTTTGGACCTTTTGCAATCCTGGC |
| | GGGGCATATAAAACAGGGGCAAGGCACAGACTCATAGCAGAGCAATCACCACCAAGCCTGGAATAACTGCAGCCACC |
| 405 | > SP0378 |
| | TGCTCTCTGACAAAGATACGGTGGGTCCCACTGATGAACTGTGCTGCCACAGTAAATGTAGCCACTATGCCTATCTCCATTCTGAAGATGTGCCCTGTTCAAACATGTCCTAATACTCTGTCTCTGCAAGGGTCATCAGTAGTTT |
| | TCCATCTTACTCAACATCCTCCCAGTGAGTCATATGTTTGCTCACTGAAGGTTACTAGTTAACAGGCATCCCTTAAACAGGATATAAAAGGACTTCAGCAGGACTGCTCGAAACATCCCACTCAGCCACC |
| 406 | > SP0379 |
| | CCTCCCCGTGTTCCTGCTCTTTGTCCCTCTGTCCTACTTAGACTAATATTTGCCTTGGGTACTGCAAACAGGAAATGGGGGAGGGACAGGAGTAGGGCGGCCCTGTTCAAACATGTCCTAATACTCTGTCTCTGCAAGGGTCATC |
| | AGTAGTTTTCCATCTTACTCAACATCCTCCCAGTGAGTCATATGTTTGCTCACTGAAGGTTACTAGTTAACAGGCATCCCTTAAACAGGATATAAAAGGACTTCAGCAGGACTGCTCGAAACATCCCACTCAGCCACC |
| 407 | > SP0380 |
| | CCGCCCCCACTGAACCCTTGACCCCTGCCCTGCAGCCCCCGCAGCTTGCTGTTTGCCCACTCTATTTGCCCAGCCCCAGCCCTGTTCAAACATGTCCTAATACTCTGTCTCTGCAAGGGTCATCAGTAGTTTTCCATCTTACTCA |
| | ACATCCTCCCAGTGAGTCATATGTTTGCTCACTGAAGGTTACTAGTTAACAGGCATCCCTTAAACAGGATATAAAAGGACTTCAGCAGGACTGCTCGAAACATCCCACTCAGCCACC |
| 408 | > SP0381 |
| | AAGCTTTCTGAACAGCCAAACAGAGATTCCAAAGTTCAGGCACCAAAGTTCAGACCCTAACAGTTATTTACAAGGGTCAGTTAACCCCTGTTCAAACATGTCCTAATACTCTGTCTCTGCAAGGGTCATCAGTAGTTTTCCATCT |
| | TACTCAACATCCTCCCAGTGAGTCATATGTTTGCTCACTGAAGGTTACTAGTTAACAGGCATCCCTTAAACAGGATATAAAAGGACTTCAGCAGGACTGCTCGAAACATCCCACTCAGCCACC |
| 409 | > SP0272 (LVR_133_V1) |
| | AAGCAAATATTTGTGGTTATGGATTAACTCGAACTGTTTGCCCACTCTATTTGCCCTGTACCAGAATGAACATTGAACTTTGGACTATACCTGAGGGGTGAGGTAAACAACAGGACTATAAATGGCCCGGGAGGCGCCCTTTGGA |
| | CCTTTTGCAATCCTGGCGCTCTTTTGTTTTACATGAAGGGTCTGGCAGCCAAAGCAATCACTCAAAGTTCAAACCTTATCATTTTTTGCTTTGTTCCTCTTGGCCTTGGTTTTGTACATCAGCTTTGAAAATACCATCCCAGGGT |
| | TAATGCTGGGGTTAATTTATAACTAAGAGTGCTCTAGTTTTGCAATACAGGACATGCTATAAAAATGGAAAGATGTTGCTTTCTGAGAGATGCGCCACC |
| 410 | > SP0273 (LVR 133_V2) |
| | GGCGCCCTTTGGACCTTTTGCAATCCTGGAGCAAACAGCAAACACTGTACCAGAATGAACATTGAACTTTGGACTATACCTGAGGGGTGAGGTAAACAACAGGACTATAAATGGCCCGGGAGGCGCCCTTTGGACCTTTTGCAAT |
| | CCTGGCGCTCTTTTGTTTTACATGAAGGGTCTGGCAGCCAAAGCAATCACTCAAAGTTCAAACCTTATCATTTTTTGCTTTGTTCCTCTTGGCCTTGGTTTTGTACATCAGCTTTGAAAATACCATCCCAGGGTTAATGCTGGGG |
| | TTAATTTATAACTAAGAGTGCTCTAGTTTTGCAATACAGGACATGCTATAAAAATGGAAAGATGTTGCTTTCTGAGAGATGCGCCACC |
| 411 | > SP0368 |
| | AGGTTAATTTTTAAAAAGCAGTCAAAAGTCCAAGTGGCCCTTGGCAGCATTTACTCTCTCTGTTTGCTCTGGTTAATAATCTCAGGAGCACAAACATTCCAGTCATATGTTTGCTCACTGAAGGTTACTAGTTAACAGGCATCCC |
| | TTAAACAGGATATAAAAGGACTTCAGCAGGACTGCTCGAAACATCCCACTCAGCCACC |
| 412 | > SP0373 |
| | AGGTTAATTTTTAAAAAGCAGTCAAAAGTCCAAGTGGCCCTTGGCAGCATTTACTCTCTCTGTTTGCTCTGGTTAATAATCTCAGGAGCACAAACATTCCTGTACCGGCCCGGGAGGCGCCCTTTGGACCTTTTGCAATCCTGGC |
| | GGGGCATATAAAACAGGGGCAAGGCACAGACTCATAGCAGAGCAATCACCACCAAGCCTGGAATAACTGCAGCCACC |
| 413 | > SP0378 |
| | TGCTCTCTGACAAAGATACGGTGGGTCCCACTGATGAACTGTGCTGCCACAGTAAATGTAGCCACTATGCCTATCTCCATTCTGAAGATGTGCCCTGTTCAAACATGTCCTAATACTCTGTCTCTGCAAGGGTCATCAGTAGTTT |
| | TCCATCTTACTCAACATCCTCCCAGTGAGTCATATGTTTGCTCACTGAAGGTTACTAGTTAACAGGCATCCCTTAAACAGGATATAAAAGGACTTCAGCAGGACTGCTCGAAACATCCCACTCAGCCACC |
| 414 | > SP0379 |
| | CCTCCCCGTGTTCCTGCTCTTTGTCCCTCTGTCCTACTTAGACTAATATTTGCCTTGGGTACTGCAAACAGGAAATGGGGGAGGGACAGGAGTAGGGCGGCCCTGTTCAAACATGTCCTAATACTCTGTCTCTGCAAGGGTCATC |
| | AGTAGTTTTCCATCTTACTCAACATCCTCCCAGTGAGTCATATGTTTGCTCACTGAAGGTTACTAGTTAACAGGCATCCCTTAAACAGGATATAAAAGGACTTCAGCAGGACTGCTCGAAACATCCCACTCAGCCACC |
| 415 | > SP0380 |
| | CCGCCCCCACTGAACCCTTGACCCCTGCCCTGCAGCCCCCGCAGCTTGCTGTTTGCCCACTCTATTTGCCCAGCCCCAGCCCTGTTCAAACATGTCCTAATACTCTGTCTCTGCAAGGGTCATCAGTAGTTTTCCATCTTACTCA |
| | ACATCCTCCCAGTGAGTCATATGTTTGCTCACTGAAGGTTACTAGTTAACAGGCATCCCTTAAACAGGATATAAAAGGACTTCAGCAGGACTGCTCGAAACATCCCACTCAGCCACC |
| 416 | > SP0381 |
| | AAGCTTTCTGAACAGCCAAACAGAGATTCCAAAGTTCAGGCACCAAAGTTCAGACCCTAACAGTTATTTACAAGGGTCAGTTAACCCCTGTTCAAACATGTCCTAATACTCTGTCTCTGCAAGGGTCATCAGTAGTTTTCCATCT |
| | TACTCAACATCCTCCCAGTGAGTCATATGTTTGCTCACTGAAGGTTACTAGTTAACAGGCATCCCTTAAACAGGATATAAAAGGACTTCAGCAGGACTGCTCGAAACATCCCACTCAGCCACC |
| 417 | > SP0384 |
| | AGGTTAATTTTTAAAAAGCAGTCAAAAGTCCAAGTGGCCCTTGGCAGCATTTACTCTCTCTGTTTGCTCTGGTTAATAATCTCAGGAGCACAAACATTCCGGCCCGGGAGGCGCCCTTTGGACCTTTTGCAATCCTGGCGCCGAT |
| | GACCTAATGATTCTGAGCTTGGCAAAGGTCTTATCTCCCAGCTCGCCCAGGCCCAGTGTTCCAGGAATGTGACCTTTGCTGCAGCAGCCGCTGGAGGGGGCAGAGGGGATGGGCTGGAGGTTGAGCAAACAGAGCAGCAGAAAAG |
| | GCAGTTCCTCTTCTCCAGTGCCCTCCTTCCCTGTCTCTGCCTCTCCCTCCCTTCCTCAGGCATCAGAGCGGAGACTTCAGGGAGACCAGAGCCCAGCTTGCCAGGCACTGAGCTAGAAGCCCTGCCGCCACC |
| 418 | > SP0388 |
| | AGGTTAATTTTTAAAAAGCAGTCAAAAGTCCAAGTGGCCCTTGGCAGCATTTACTCTCTCTGTTTGCTCTGGTTAATAATCTCAGGAGCACAAACATTCCGGGCATATAAAACAGGGGCAAGGCACAGACTCATAGCAGAGCAAT |
| | CACCACCAAGCCTGGAATAACTGCAGCCACC |
| 419 | > SP0396 |
| | AGGTTAATTTTTAAAAAGCAGTCAAAAGTCCAAGTGGCCCTTGGCAGCATTTACTCTCTCTGTTTGCTCTGGTTAATAATCTCAGGAGCACAAACATTCCTGTACCGGCCCGGGAGGCGCCCTTTGGACCTTTTGCAATCCTGGC |
| | GCCCTGGAGAGTCCTTTAGCAGGGCAAAGTGCAACATAGGCAGACCTTAAGGGATGACTCAGTAACAGATAAGCTTTGTGTGCCTGCAGGGCATATAAAACAGGGGCAAGGCACAGACTCATAGCAGAGCAATCACCACCAAGCC |
| | TGGAATAACTGCAGCCACC |
| 420 | > SP0397 |
| | AGGTTAATTTTTAAAAAGCAGTCAAAAGTCCAAGTGGCCCTTGGCAGCATTTACTCTCTCTGTTTGCTCTGGTTAATAATCTCAGGAGCACAAACATTCCTGTACCCACTGAACCCTTGACCCCTGCCCTGCAGCCCCCGCAGCT |
| | TGCTGTTTGCCCACTCTATTTGCCCAGCCCCAGCCCTGGAGAGTCCTTTAGCAGGGCAAAGTGCAACATAGGCAGACCTTAAGGGATGACTCAGTAACAGATAAGCTTTGTGTGCCTGCAGGGCATATAAAACAGGGGCAAGGCA |
| | CAGACTCATAGCAGAGCAATCACCACCAAGCCTGGAATAACTGCAGCCACC |
| 421 | > SP0398 |
| | CAGGCTTTCACTTTCTCGCCAACTTACAAGGCCTTTCTGTGTAAACAATACCTGAACCTTTACCCCGTTGCCCGGCAACGGCCAGGTCTGTGCCAAGTGTTTGAGGTTAATTTTTAAAAAGCAGTCAAAAGTCCAAGTGGCCCTT |
| | GGCAGCATTTACTCTCTCTGTTTGCTCTGGTTAATAATCTCAGGAGCACAAACATTCCTGTACCAGAATGAACATTGAACTTTGGACTATACCTGAGGGGTGAGGTAAACAACAGGACTATAAATGGCCCGGGAGGCGCCCTTTG |
| | GACCTTTTGCAATCCTGGCGCACTGAACCCTTGACCCCTGCCCTGCAGCCCCCGCAGCTTGCTGTTTGCCCACTCTATTTGCCCAGCCCCAGCCCTGGAGAGTCCTTTAGCAGGGCAAAGTGCAACATAGGCAGACCTTAAGGGA |
| | TGACTCAGTAACAGATAAGCTTTGTGTGCCTGCAGGGCATATAAAACAGGGGCAAGGCACAGACTCATAGCAGAGCAATCACCACCAAGCCTGGAATAACTGCAGCCACC (SEQ ID NO: 249) |
| 422 | > SP0399 |
| | AGAATGAACATTGAACTTTGGACTATACCTGAGGGGTGAGGTAAACAACAGGACTATAAATGGGCATATAAAACAGGGGCAAGGCACAGACTCATAGCAGAGCAATCACCACCAAGCCTGGAATAACTGCAGCCACC |
| 423 | > SP0403 |
| | CAGGCTTTCACTTTCTCGCCAACTTACAAGGCCTTTCTGTGTAAACAATACCTGAACCTTTACCCCGTTGCCCGGCAACGGCCAGGTCTGTGCCAAGTGTTTGAAGCAAATATTTGTGGTTATGGATTAACTCGAACTGTTTGCC |
| | CACTCTATTTGCCCTGTACCGGCCCGGGAGGCGCCCTTTGGACCTTTTGCAATCCTGGCGCACTGAACCCTTGACCCCTGCCCTGCAGCCCCCGCAGCTTGCTGTTTGCCCACTCTATTTGCCCAGCCCCAGCCCTGGAGAGTCC |
| | TTTAGCAGGGCAAAGTGCAACATAGGCAGACCTTAAGGGATGACTCAGTAACAGATAAGCTTTGTGTGCCTGCAGGGCATATAAAACAGGGGCAAGGCACAGACTCATAGCAGAGCAATCACCACCAAGCCTGGAATAACTGCAG |
| | CCACC |
| 424 | > SP0404 |
| | CAGGCTTTCACTTTCTCGCCAACTTACAAGGCCTTTCTGTGTAAACAATACCTGAACCTTTACCCCGTTGCCCGGCAACGGCCAGGTCTGTGCCAAGTGTTTGAAGCAAATATTTGTGGTTATGGATTAACTCGAACTGTTTGCC |
| | CACTCTATTTGCCCTGTACCAGAATGAACATTGAACTTTGGACTATACCTGAGGGGTGAGGTAAACAACAGGACTATAAATGGCCCGGGAGGCGCCCTTTGGACCTTTTGCAATCCTGGCGCACTGAACCCTTGACCCCTGCCCT |
| | GCAGCCCCCGCAGCTTGCTGTTTGCCCACTCTATTTGCCCAGCCCCAGCCCTGGAGAGTCCTTTAGCAGGGCAAAGTGCAACATAGGCAGACCTTAAGGGATGACTCAGTAACAGATAAGCTTTGTGTGCCTGCAGGGCATATAA |
| | AACAGGGGCAAGGCACAGACTCATAGCAGAGCAATCACCACCAAGCCTGGAATAACTGCAGCCACC |
| 425 | > SP0405 |
| | CAGGCTTTCACTTTCTCGCCAACTTACAAGGCCTTTCTGTGTAAACAATACCTGAACCTTTACCCCGTTGCCCGGCAACGGCCAGGTCTGTGCCAAGTGTTTGAAGCAAATATTTGTGGTTATGGATTAACTCGAACTGTTTGCC |
| | CACTCTATTTGCCCTGTACCAGAATGAACATTGAACTTTGGACTATACCTGAGGGGTGAGGTAAACAACAGGACTATAAATGGCCCGGGAGGCGCCCTTTGGACCTTTTGCAATCCTGGCGCACTGAACCCTTGACCCCTGCCCT |
| | GCAGCCCCCGCAGCTTGCTGTTTGCCCACTCTATTTGCCCAGCCCCAGGGGCATATAAAACAGGGGCAAGGCACAGACTCATAGCAGAGCAATCACCACCAAGCCTGGAATAACTGCAGCCACC |
| 426 | >SP0406 |
| | AGGTTAATTTTTAAAAAGCAGTCAAAAGTCCAAGTGGCCCTTGGCAGCATTTACTCTCTCTGTTTGCTCTGGTTAATAATCTCAGGAGCACAAACATTCCGGCCCGGGAGGCGCCCTTTGGACCTTTTGCAATCCTGGCGAGTCA |
| | TATGTTTGCTCACTGAAGGTTACTAGTTAACAGGCATCCCTTAAACAGGATATAAAAGGACTTCAGCAGGACTGCTCGAAACATCCCACTCAGCCACC |
| 427 | > SP0407 |
| | AGGTTAATTTTTAAAAAGCAGTCAAAAGTCCAAGTGGCCCTTGGCAGCATTTACTCTCTCTGTTTGCTCTGGTTAATAATCTCAGGAGCACAAACATTCCCAGGCTTTCACTTTCTCGCCAACTTACAAGGCCTTTCTGTGTAAA |
| | CAATACCTGAACCTTTACCCCGTTGCCCGGCAACGGCCAGGTCTGTGCCAAGTGTTTGGGGCATATAAAACAGGGGCAAGGCACAGACTCATAGCAGAGCAATCACCACCAAGCCTGGAATAACTGCAGCCACC |
| 428 | > SP0409 |
| | AGGTTAATTTTTAAAAAGCAGTCAAAAGTCCAAGTGGCCCTTGGCAGCATTTACTCTCTCTGTTTGCTCTGGTTAATAATCTCAGGAGCACAAACATTCCCCCTGTTCAAACATGTCCTAATACTCTGTCTCTGCAAGGGTCATC |
| | AGTAGTTTTCCATCTTACTCAACATCCTCCCAGTGGGGCATATAAAACAGGGGCAAGGCACAGACTCATAGCAGAGCAATCACCACCAAGCCTGGAATAACTGCAGCCACC |
| 429 | > SP0411 |
| | CCCTGTTCAAACATGTCCTAATACTCTGTCTCTGCAAGGGTCATCAGTAGTTTTCCATCTTACTCAACATCCTCCCAGTGAGTCATATGTTTGCTCACTGAAGGTTACTAGTTAACAGGCATCCCTTAAACAGGATATAAAAGGA |
| | CTTCAGCAGGACTGCTCGAAACATCCCACTCAGCCACC |
| 91 | > SP0412 |
| | AGGTTAATTTTTAAAAAGCAGTCAAAAGTCCAAGTGGCCCTTGGCAGCATTTACTCTCTCTGTTTGCTCTGGTTAATAATCTCAGGAGCACAAACATTCCCCCTGTTCAAACATGTCCTAATACTCTGTCTCTGCAAGGGTCATC |
| | AGTAGTTTTCCATCTTACTCAACATCCTCCCAGTGAGTCATATGTTTGCTCACTGAAGGTTACTAGTTAACAGGCATCCCTTAAACAGGATATAAAAGGACTTCAGCAGGACTGCTCGAAACATCCCACTCAGCCACC |
| 430 | > SP0413 |
| | AGGTTAATTTTTAAAAAGCAGTCAAAAGTCCAAGTGGCCCTTGGCAGCATTTACTCTCTCTGTTTGCTCTGGTTAATAATCTCAGGAGCACAAACATTCCTGTACCGGCCCGGGAGGCGCCCTTTGGACCTTTTGCAATCCTGGC |
| | GAGTCATATGTTTGCTCACTGAAGGTTACTAGTTAACAGGCATCCCTTAAACAGGATATAAAAGGACTTCAGCAGGACTGCTCGAAACATCCCACTCAGCCACC |
| 431 | >TTR promoter |
| | TCGAGCTTGGGCTGCAGGTCGAGGGCACTGGGAGGATGTTGAGTAAGATGGAAAACTACTGATGACCCTTGCAGAGACAGAGTATTAGGACATGTTTGAACAGGGGCCGGGCGATCAGCAGGTAGCTCTAGAGGATCCCCGTCTG |
| | TCTGCACATTTCGTAGAGCGAGTGTTCCGATACTCTAATCTCCCTAGGCAAGGTTCATATTTGTGTAGGTTACTTATTCTCCTTTTGTTGACTAAGTCAATAATCAGAATCAGCAGGTTTGGAGTCAGCTTGGCAGGGATCAGCA |
| | GCCTGGGTTGGAAGGAGGGGGTATAAAAGCCCCTTCACCAGGAGAAGCCGTCACACAGA |
| 432 | > LP1 |
| | CCCTAAAATGGGCAAACATTGCAAGCAGCAAACAGCAAACACACAGCCCTCCCTGCCTGCTGACCTTGGAGCTGGGGCAGAGGTCAGAGACCTCTCTGGGCCCATGCCACCTCCAACATCCACTCGACCCCTTGGAATTTCGGTG |
| | GAGAGGAGCAGAGGTTGTCCTGGCGTGGTTTAGGTAGTGTGAGAGGGGAATGACTCCTTTCGGTAAGTGCAGTGGAAGCTGTACACTGCCCAGGCAAAGCGTCCGGGCAGCGTAGGCGGGCGACTCAGATCCCAGCCAGTGGACT |
| | TAGCCCCTGTTTGCTCCTCCGATAACTGGGGTGACCTTGGTTAATATTCACCAGCAGCCTCCCCCGTTGCCCCTCTGGATCCACTGCTTAAATACGGACGAGGACAGGGCCCTGTCTCCTCAGCTTCAGGCACCACCACTGACCT |
| | GGGACAGTGAATCCGGACTCTAAGGTAAATATAAAATTTTTAAGTGTATAATGTGTTAAACTACTGATTCTAATTGTTTCTCTCTTTTAGATTCCAACCTTTGGAACTGAATTCTAGACCACC |
| 433 | > CMV-IE |
| | ATAGTAATCAATTACGGGGTCATTAGTTCATAGCCCATATATGGAGTTCCGCGTTACATAACTTACGGTAAATGGCCCGCCTGGCTGACCGCCCAACGACCCCCGCCCATTGACGTCAATAATGACGTATGTTCCCATAGTAACG |
| | CCAATAGGGACTTTCCATTGACGTCAATGGGTGGAGTATTTACGGTAAACTGCCCACTTGGCAGTACATCAAGTGTATCATATGCCAAGTACGCCCCCTATTGACGTCAATGACGGTAAATGGCCCGCCTGGCATTATGCCCAGT |
| | ACATGACCTTATGGGACTTTCCTACTTGGCAGTACATCTACGTATTAGTCATCGCTATTACCATGGTGATGCGGTTTTGGCAGTACATCAATGGGCGTGGATAGCGGTTTGACTCACGGGGATTTCCAAGTCTCCACCCCATTGA |
| | CGTCAATGGGAGTTTGTTTTGGCACCAAAATCAACGGGACTTTCCAAAATGTCGTAACAACTCCGCCCCATTGACGCAAATGGGCGGTAGGCGTGTACGGTGGGAGGTCTATATAAGCAGAGCTGGTTTAGTGAACCGTCAGATC |
| 434 | > CBA |
| | AGATCTGAATTCGGTACCTAGTTATTAATAGTAATCAATTACGGGGTCATTAGTTCATAGCCCATATATGGAGTTCCGCGTTACATAACTTACGGTAAATGGCCCGCCTGGCTGACCGCCCAACGACCCCCGCCCATTGACGTCA |
| | ATAATGACGTATGTTCCCATAGTAACGCCAATAGGGACTTTCCATTGACGTCAATGGGTGGAGTATTTACGGTAAACTGCCCACTTGGCAGTACATCAAGTGTATCATATGCCAAGTACGCCCCCTATTGACGTCAATGACGGTA |
| | AATGGCCCGCCTGGCATTATGCCCAGTACATGACCTTATGGGACTTTCCTACTTGGCAGTACATCTACGTATTAGTCATCGCTATTACCATGGTCGAGGTGAGCCCCACGTTCTGCTTCACTCTCCCCATCTCCCCCCCCTCCCC |
| | ACCCCCAATTTTGTATTTATTTATTTTTTAATTATTTTGTGCAGCGATGGGGGCGGGGGGGGGGGGGGGGCGCGCGCCAGGCGGGGCGGGGCGGGGCGAGGGGCGGGGCGGGGCGAGGCGGAGAGGTGCGGCGGCAGCCAATCAG |
| | AGCGGCGCGCTCCGAAAGTTTCCTTTTATGGCGAGGCGGCGGCGGCGGCGGCCCTATAAAAAGCGAAGCGCGCGGCGGGCGGGAGTCGCTGCGCGCTGCCTTCGCCCCGTGCCCCGCTCCGCCGCCGCCTCGCGCCGCCCGCCCC |
| | GGCTCTGACTGACCGCGTTACTCCCACAGGTGAGCGGGCGGGACGGCCCTTCTCCTCCGGGCTGTAATTAGCGCTTGGTTTAATGACGGCTTGTTTCTTTTCTGTGGCTGCGTGAAAGCCTTGAGGGGCTCCGGGAGGGCCCTTT |
| | GTGCGGGGGGAGCGGCTCGGGGGGTGCGTGCGTGTGTGTGTGCGTGGGGAGCGCCGCGTGCGGCTCCGCGCTGCCCGGCGGCTGTGAGCGCTGCGGGCGCGGCGCGGGGCTTTGTGCGCTCCGCAGTGTGCGCGAGGGGAGCGCG |
| | GCCGGGGGCGGTGCCCCGCGGTGCGGGGGGGGCTGCGAGGGGAACAAAGGCTGCGTGCGGGGTGTGTGCGTGGGGGGGTGAGCAGGGGGTGTGGGCGCGTCGGTCGGGCTGCAACCCCCCCTGCACCCCCCTCCCCGAGTTGCTG |
| | AGCACGGCCCGGCTTCGGGTGCGGGGCTCCGTACGGGGCGTGGCGCGGGGCTCGCCGTGCCGGGCGGGGGGTGGCGGCAGGTGGGGGTGCCGGGCGGGGGGGGGCCGCCTCGGGCCGGGGAGGGCTCGGGGGAGGGGCGCGGCGG |
| | CCCCCGGAGCGCCGGCGGCTGTCGAGGCGCGGCGAGCCGCAGCCATTGCCTTTTATGGTAATCGTGCGAGAGGGCGCAGGGACTTCCTTTGTCCCAAATCTGTGCGGAGCCGAAATCTGGGAGGCGCCGCCGCACCCCCTCTAGC |
| | GGGCGCGGGGCGAAGCGGTGCGGCGCCGGCAGGAAGGAAATGGGCGGGGAGGGCCTTCGTGCGTCGCCGCGCCGCCGTCCCCTTCTCCCTCTCCAGCCTCGGGGCTGTCCGCGGGGGGACGGCTGCCTTCGGGGGGGACGGGGCA |
| | GGGCGGGGTTCGGCTTCTGGCGTGTGACCGGCGGCTCTAGAGCCTCTGCTAACCATGTTCATGCCTTCTTCTTTTTCCTACAGCTCCTGGGCAACGTGCTGGTTATTGTGCTGTCTCATCATTTTGGCAAAGAATTCCTCGAAGA |
| | TCTAGGCAACGCGTCTCGAGGCGGCCGCCGCCACC |
| 435 | > TBG |
| | AGGTTAATTTTTAAAAAGCAGTCAAAAGTCCAAGTGGCCCTTGGCAGCATTTACTCTCTCTGTTTGCTCTGGTTAATAATCTCAGGAGCACAAACATTCCAGATCCAGGTTAATTTTTAAAAAGCAGTCAAAAGTCCAAGTGGCC |
| | CTTGGCAGCATTTACTCTCTCTGTTTGCTCTGGTTAATAATCTCAGGAGCACAAACATTCCAGATCCGGCGCGCCAGGGCTGGAAGCTACCTTTGACATCATTTCCTCTGCGAATGCATGTATAATTTCTACAGAACCTATTAGA |
| | AAGGATCACCCAGCCTCTGCTTTTGTACAACTTTCCCTTAAAAAACTGCCAATTCCACTGCTGTTTGGCCCAATAGTGAGAACTTTTTCCTGCTGCCTCTTGGTGCTTTTGCCTATGGCCCCTATTCTGCCTGCTGAAGACACTC |
| | TTGCCAGCATGGACTTAAACCCCTCCAGCTCTGACAATCCTCTTTCTCTTTTGTTTTACATGAAGGGTCTGGCAGCCAAAGCAATCACTCAAAGTTCAAACCTTATCATTTTTTGCTTTGTTCCTCTTGGCCTTGGTTTTGTACA |
| | TCAGCTTTGAAAATACCATCCCAGGGTTAATGCTGGGGTTAATTTATAACTAAGAGTGCTCTAGTTTTGCAATACAGGACATGCTATAAAAATGGAAAGATGTTGCTTTCTGAGAGACTGCAGAAGTTGGTCGTGAGGCACTGGG |
| | CAGGTAAGTATCAAGGTTACAAGACAGGTTTAAGGAGACCAATAGAAACTGGGCTTGTCGAGACAGAGAAGACTCTTGCGTTTCTGATAGGCACCTATTGGTCTTACTGACATCCACTTTGCCTTTCTCTCCACAGGGCAATCCG |
| | GTACTGTTGGTAAAGCCACC |
| 438 | >CMV-IE 5′ UTR with 3′ Kozac GCCACC. |
| | TCAGATCGCCTGGAGACGCCATCCACGCTGTTTTGACCTCCATAGAAGACACCGGGACCGATCCAGCCTCCGCGGCCGGGAACGGTGCATTGGAACGCGGATTCCCCGTGCCAAGAGTGACGTAAGTACCGCCTATAGACTCTAT |
| | AGGCACACCCCTTTGGCTCTTATGCATGAACGGTGGAGGGCAGTGTAGTCTGAGCAGTACTCGTTGCTGCCGCGCGCGCCACCAGACATAATAGCTGACAGACTAACAGACTGTTCCTTTCCATGGGTCTTTTCTGCAGGCCACC |
| 439 | > LVR 0243-5′ UTR |
| | TGA AATGCCTGCC ATATATTAGT GCCCTGAAGT CCAAAGGTAG AGGAACCGAG TGTTTAAAAA TTACTGTGGC TGTGGAGTCA ACATGATGTA AAAAAACAAA CATTTGGATA ACACCAAGAA |
| | GCCAGATATG GTTGAAATGT TGACTGGTTG ACAAAAATAA TTTGGGTTGC TTAATGGTGC ACAAAGGTAA TGCAAAAAGG TTAATTTTTA AAAAGCAGTC AAAAGTCCAA GTGGCCCTTG GCAGCATTTA |
| | CTCTCTCTGT TTGCTCTGGT TAATAATCTC AGGAGCACAA ACATTCCGGC CCGGGAGGCG CCCTTTGGAC CTTTTGCAAT CCTGGCGCAC TGAACCCTTG ACCCCTGCCC TGCAGCCCCC GCAGCTTGCT |
| | GTTTGCCCAC TCTATTTGCC CAGCCCCAGC CCTGGAGAGT CCTTTAGCAG GGCAAAGTGC AACATAGGCA GACCTTAAGG GATGACTCAG TAACAGATAA GCTTTGTGTG CCTGCAGGGC ATATAAAACA |
| | GGGGCAAGGC ACAGACTCAT AGCAGAGCAA T |
| 440 | > LVR 0412-5′ UTR |
| | AGG TTAATTTTTA AAAAGCAGTC AAAAGTCCAA GTGGCCCTTG GCAGCATTTA CTCTCTCTGT TTGCTCTGGT TAATAATCTC AGGAGCACAA ACATTCCCCC TGTTCAAACA TGTCCTAATA |
| | CTCTGTCTCT GCAAGGGTCA TCAGTAGTTT TCCATCTTAC TCAACATCCT CCCAGTGAGT CATATGTTTG CTCACTGAAG GTTACTAGTT AACAGGCATC CCTTAAACAG GATATAAAAG GACTTCAGCA |
| | GGACTGCTCG AAACATCCCA CT |
| 441 | > AQ promoter (LVR_SP0131 A1) -5′ UTRs |
| | AGG TTAATTTTTA AAAAGCAGTC AAAAGTCCAA GTGGCCCTTG GCAGCATTTA CTCTCTCTGT TTGCTCTGGT TAATAATCTC AGGAGCACAA ACATTCCTGT ACCGGCCCGG GAGGCGCCCT |
| | TTGGACCTTT TGCAATCCTG GCGCACTGAA CCCTTGACCC CTGCCCTGCA GCCCCCGCAG CTTGCTGTTT GCCCACTCTA TTTGCCCAGC CCCAGCCCTG GAGAGTCCTT TAGCAGGGCA AAGTGCAACA |
| | TAGGCAGACC TTAAGGGATG ACTCAGTAAC AGATAAGCTT TGTGTGCCTG CAGGGCATAT AAAACAGGGG CAAGGCACAG ACTCATAGCA GAGCAAT |
| 442 | > MVM Intron |
| | CTAGCCCTAAGGTAAGTTGGCGCCGTTTAAGGGATGGTTGGTTGGTGGGGTATTAATGTTTAATTACCTTTTTTACAGGCCTGAA |
| 443 | > HBB2 intron sequence |
| | GTACACATAT TGACCAAATC AGGGTAATTT TGCATTTGTA ATTTTAAAAA ATGCTTTCTT CTTTTAATAT ACTTTTTTGT TTATCTTATT TCTAATACTT TCCCTAATCT CTTTCTTTCA GGGCAATAAT |
| | GATACAATGT ATCATGCCTC TTTGCACCAT TCTAAAGAAT AACAGTGATA ATTTCTGGGT TAAGGCAATA GCAATATTTC TGCATATAAA TATTTCTGCA TATAAATTGT AACTGATGTA AGAGGTTTCA |
| | TATTGCTAAT AGCAGCTACA ATCCAGCTAC CATTCTGCTT TTATTTTCTG GTTGGGATAA GGCTGGATTA TTCTGAGTCC AAGCTAGGCC CTTTTGCTAA TCTTGTTCAT ACCTCTTATC TTCCTCCCAC |
| | AGCTCCTGGG CAACCTGCTG GTCTCTCTGC TGGCCCATCA CTTTGGCAAA |
| | G |
| 444 | >HBB INTRON |
| | TACTAGCAGCTACAATCCAGCTACCATTCTGCTTTTATTTTATGGTTGGGATAAGGCTGGATTATTCTGAGTCCAAGCTAGGCCCTTTTGCTAATCATGTTCATACCTCTTATCTTCCTCCCACAGCTCCTGGGCAACGTGCTGG |
| | TCTGTGTGCTGGCCCATCACTTTGGCAAAGAATT |
| 445 | >UBC INTRON |
| | ACTTGGTGAGTAGCGGGCTGCTGGGCTGGCCGGGGCTTTCGTGGCCGCCGGGCCGCTCGGTGGGACGGAAGCGTGTGGAGAGACCGCCAAGGGCTGTAGTCTGGGTCCGCGAGCAAGGTTGCCCTGAACTGGGGGTTGGGGGGAG |
| | CGCAGCAAAATGGCGGCTGTTCCCGAGTCTTGAATGGAAGACGCTTGTGAGGCGGGCTGTGAGGTCGTTGAAACAAGGTGGGGGGCATGGTGGGCGGCAAGAACCCAAGGTCTTGAGGCCTTCGCTAATGCGGGAAAGCTCTTAT |
| | TCGGGTGAGATGGGCTGGGGCACCATCTGGGGACCCTGACGTGAAGTTTGTCACTGACTGGAGAACTCGGTTTGTCGTCTGTTGCGGGGGCGGCAGTTATGCGGTGCCGTTGGGCAGTGCACCCGTACCTTTGGGAGCGCGCGCC |
| | CTCGTCGTGTCGTGACGTCACCCGTTCTGTTGGCTTATAATGCAGGGTGGGGCCACCTGCCGGTAGGTGTGCGGTAGGCTTTTCTCCGTCGCAGGACGCAGGGTTCGGGCCTAGGGTAGGCTCTCCTGAATCGACAGGCGCCGGA |
| | CCTCTGGTGAGGGGAGGGATAAGTGAGGCGTCAGTTTCTTTGGTCGGTTTTATGTACCTATCTTCTTAAGTAGCTGAAGCTCCGGTTTTGAACTATGCGCTCGGGGTTGGCGAGTGTGTTTTGTGAAGTTTTTTAGGCACCTTTT |
| | GAAATGTAATCATTTGGGTCAATATGTAATTTTCAGTGTTAGACTAGTAAATTGTCCGCTAAATTCTGGCCGTTTTTGGCTTTTTTGTTAGAC |
| 446 | >MODIFIED CMVIE INTRON SEQUENCE. |
| | CAAGAGTGACGTAAGTACCGCCTATAGACTCTATAGGCACACCCCTTTGGCTCTTATGCATGAACGGTGGAGGGCAGTGTAGTCTGAGCAGTACTCGTTGCTGCCGCGCGCGCCACCAGACATAATAGCTGACAGACTAACAGAC |
| | TGTTCCTTTCCATGGGTCTTTTCTGCAG |
| 465 | >termination sequence |
| | TGATAACTCGAG |
| 464 | > pAAV-LSPhGAA w/mod endogenous GAA signal peptide |
| | CTGCGCGCTCGCTCGCTCACTGAGGCCGCCCGGGCAAAGCCCGGGCGTCGGGCGACCTTTGGTCGCCCGGCCTCAGTGAGCGAGCGAGCGCGCAGAGAGGGAGTGGCCAACTCCATCACTAGGGGTTCCTGGAGGGGTGGAGTCG |
| | TGACGTGAATTACGTCATAGGGTTAGGGAGGTCGGCCGCTCTAGGAGTTAATTTTTAAAAAGCAGTCAAAAGTCCAAGTGCCCTTGCGAGCATTTACTCTCTCTGTTTGCTCTGGTTAATAATCTCAGGAGCACAAACATTCCTT |
| | ACTAGTTCTAGGAGTTAATTTTTAAAAAGCAGTCAAAAGTCCAAGTGCCCTTGCGAGCATTTACTCTCTCTGTTTGCTCTGGTTAATAATCTCAGGAGCACAAACATTCCTTACTAGTTCTAGAGCGGCCGCCAGTGTGCTGGAA |
| | TTCGGCTTTTTTAGGGCTGGAAGCTACCTTTGACATCATTTCCTCTGCGAATGCATGTATAATTTCTACAGAACCTATTAGAAAGGATCACCCAGCCTCTGCTTTTGTACAACTTTCCCTTAAAAAACTGCCAATCCCACTGCTG |
| | TTTGGCCCAATAGTGAGAACTTTTTCCTGCTGCCTCTTGGTGCTTTTGCCTATGGCCCCTATTCTGCCTGCTGAAGACACTCTTGCCAGCATGGACTTAAACCCCTCCAGCTCTGACAATCCTCTTTCTCTTTTGTTTTACATGA |
| | AGGGTCTGGCAGCCAAAGCAATCACTCAAAGTTCAAACCTTATCATTTTTTGCTTTGTTCCTCTTGGCCTTGGTTTTGTACATCAGCTTTGAAAATACCATCCCAGGGTTAATGCTGGGGTTAATTTATAACTGAGAGTGCTCTA |
| | GTTCTGCAATACAGGACATGCTATAAAAATGGAAAGATGTTGCTTTCTGAGAGATCAGCTTACATGTGCTAGCGTAGCCAACCATGGGAGTGAGGCACCCGCCCTGCTCCCACCGGCTCCTGGCCGTCTGCGCCCTCGTGTCCTT |
| | GGCAACCGCTGCACTCCTGGGGCACATCCTACTCCATGATTTCCTGCTGGTTCCCCGAGAGCTGAGTGGCTCCTCCCCAGTCCTGGAGGAGACTCACCCAGCTCACCAGCAGGGAGCCAGCAGACCAGGGCCCCGGGACGCCCAG |
| | GCACACCCCGGCCGTCCCAGAGCAGTGCCCACACAGTGCGACGTCCCCCCCAACAGCCGCTTCGATTGCGCCCCTGACAAGGCCATCACCCAGGAACAGTGCGAGGCCCGCGGCTGCTGCTACATCCCTGCAAAGCAGGGGCTGC |
| | AGGGAGCCCAGATGGGGCAGCCCTGGTGCTTCTTCCCACCCAGCTACCCCAGCTACAAGCTGGAGAACCTGAGCTCCTCTGAAATGGGCTACACGGCCACCCTGACCCGTACCACCCCCACCTTCTTCCCCAAGGACATCCTGAC |
| | CCTGCGGCTGGACGTGATGATGGAGACTGAGAACCGCCTCCACTTCACGATCAAAGATCCAGCTAACAGGCGCTACGAGGTGCCCTTGGAGACCCCGCGTGTCCACAGCCGGGCACCGTCCCCACTCTACAGCGTGGAGTTCTCC |
| | GAGGAGCCCTTCGGGGTGATCGTGCACCGGCAGCTGGACGGCCGCGTGCTGCTGAACACGACGGTGGCGCCCCTGTTCTTTGCGGACCAGTTCCTTCAGCTGTCCACCTCGCTGCCCTCGCAGTATATCACAGGCCTCGCCGAGC |
| | ACCTCAGTCCCCTGATGCTCAGCACCAGCTGGACCAGGATCACCCTGTGGAACCGGGACCTTGCGCCCACGCCCGGTGCGAACCTCTACGGGTCTCACCCTTTCTACCTGGCGCTGGAGGACGGCGGGTCGGCACACGGGGTGTT |
| | CCTGCTAAACAGCAACGCCATGGACGTGGTCCTGCAGCCGAGCCCTGCCCTTAGCTGGAGGTCGACAGGTGGGATCCTGGACGTCTACATCTTCCTGGGCCCAGAGCCCAAGAGCGTGGTGCAGCAGTACCTGGACGTGGTGGGA |
| | TACCCGTTCATGCCGCCATACTGGGGCCTGGGCTTCCACCTGTGCCGCTGGGGCTACTCCTCCACCGCTATCACCCGCCAGGTGGTGGAGAACATGACCAGGGCCCACTTCCCCCTGGACGTCCAGTGGAACGATCTGGACTACA |
| | TGGACTCCCGGAGGGACTTCACGTTCAACAAGGATGGCTTCCGGGACTTCCCGGCCATGGTGCAGGAGCTGCACCAGGGCGGCCGGCGCTACATGATGATCGTGGATCCTGCCATCAGCAGCTCGGGCCCTGCCGGGAGCTACAG |
| | GCCCTACGACGAGGGTCTGCGGAGGGGGGTTTTCATCACCAACGAGACCGGCCAGCCGCTGATTGGGAAGGTGTGGCCCGGGTCCACTGCCTTCCCCGACTTCACCAACCCCACAGCCCTGGCCTGGTGGGAGGACATGGTGGCT |
| | GAGTTCCATGACCAGGTGCCCTTCGACGGCATGTGGATTGACATGAACGAGCCTTCCAACTTCATCAGAGGCTCTGAGGACGGCTGCCCCAACAACGAGCTGGAGAACCCACCCTACGTGCCTGGGGTGGTTGGGGGGACCCTCC |
| | AGGCGGCCACCATCTGTGCCTCCAGCCACCAGTTTCTCTCCACACACTACAACCTGCACAACCTCTACGGCCTGACCGAAGCCATCGCCTCCCACAGGGCGCTGGTGAAGGCTCGGGGGACACGCCCATTTGTGATCTCCCGCTC |
| | GACCTTTGCTGGCCACGGCCGATACGCCGGCCACTGGACGGGGGACGTGTGGAGCTCCTGGGAGCAGCTCGCCTCCTCCGTGCCAGAAATCCTGCAGTTTAACCTGCTGGGGGTGCCTCTGGTCGGGGCCGACGTCTGCGGCTTC |
| | CTGGGCAACACCTCAGAGGAGCTGTGTGTGCGCTGGACCCAGCTGGGGGCCTTCTACCCCTTCATGCGGAACCACAACAGCCTGCTCAGTCTGCCCCAGGAGCCGTACAGCTTCAGCGAGCCGGCCCAGCAGGCCATGAGGAAGG |
| | CCCTCACCCTGCGCTACGCACTCCTCCCCCACCTCTACACACTGTTCCACCAGGCCCACGTCGCGGGGGAGACCGTGGCCCGGCCCCTCTTCCTGGAGTTCCCCAAGGACTCTAGCACCTGGACTGTGGACCACCAGCTCCTGTG |
| | GGGGGAGGCCCTGCTCATCACCCCAGTGCTCCAGGCCGGGAAGGCCGAAGTGACTGGCTACTTCCCCTTGGGCACATGGTACGACCTGCAGACGGTGCCAATAGAGGCCCTTGGCAGCCTCCCACCCCCACCTGCAGCTCCCCGT |
| | GAGCCAGCCATCCACAGCGAGGGGCAGTGGGTGACGCTGCCGGCCCCCCTGGACACCATCAACGTGCACCTCCGGGCTGGGTACATCATCCCCCTGCAGGGCCCTGGCCTCACAACCACAGAGTCCCGCCAGCAGCCCATGGCCC |
| | TGGCTGTGGCCCTGACCAAGGGTGGAGAGGCCCGAGGGGAGCTGTTCTGGGACGACGGAGAGAGCCTGGAAGTGCTGGAGCGAGGGGCCTACACACAGGTCATCTTCCTGGCCAGGAATAACACGATCGTGAATGAGCTGGTACG |
| | TGTGACCAGTGAGGGAGCTGGCCTGCAGCTGCAGAAGGTGACTGTCCTGGGCGTGGCCACGGCGCCCCAGCAGGTCCTCTCCAACGGTGTCCCTGTCTCCAACTTCACCTACAGCCCCGACACCAAGGTCCTGGACATCTGTGTC |
| | TCGCTGTTGATGGGAGAGCAGTTTCTCGTCAGCTGGTGTTGATAACTCGAGCCGGGCGGAGTGTGTTAGTCTCTCCAGAGGGAGGCTGGTTCCCCAGGGAAGCAGAGCCTGTGTGCGGGCAGCAGCTGTGTGCGGGCCTGGGGGT |
| | TGTTAAGTGCAATTATTTTTAATAAAAGGGGCATTTGGAAAAAAAAAAAAAAGGTAGCAGTCGACAGATGAATTCTGCAGATCTGTGGCTTCTAGCTGCCCGGGTGGCATCCCTGTGACCCCTCCCCAGTGCCTCTCCTGGCCCT |
| | GGAAGTTGCCACTCCAGTGCCCACCAGCCTTGTCCTAATAAAATTAAGTTGCATCATTTTGTCTGACTAGGTGTCCTTCTATAATATTATGGGGTGGAGGGGGGTGGTATGGAGCAAGGGGCAAGTTGGGAAGACAACCTGAGTT |
| | GTTGGGATTCCAGGCATCGAGTAGATAAGTAGCATGGCGGGTTAATCATTAACTACAAGGAACCCCTAGTGATGGAGTTGGCCACTCCCTCTCTGCGCGCTCGCTCGCTCACTGAGGCCGGGCGACCAAAGGTCGCCCGACGCCC |
| | GGGCTTTGCCCGGGCGGCCTCAGTGAGCGAGCGAGCGCGCAGAGAGGGACAGATCCGAAGCCGGGCAAATCAGCGCCTGGCAGCAGTGGCGTCTGGCGGAAAACCTCAGTGTGACGCTCCCCGCCGCGTCCCACGCTTGTTCCCG |
| | GATCTGACCACCAGCGAAATCCGATTTTTGCACCGAGCTGGGTAATAAGCGTTGGCAATTTAACCGCCAGTCAGGCTTTCTTTCACAGTGTGGATTGGCGATAAAAAACAACTGCTGACGCCGCTGCGCGATCAGTTCACCCGTT |
| | CACCGCTGGATAACGACTTGGCGTAAGTGAAGCGACCCGTAAGACCCTAACGCCTGGGTCGAACGCTGGAAGGCGGCGGGCCAAACCAGGCCGAAGCAGCGTTGTTGCAGTTCACGGCAGATACACTTGCTGTTGCGGTGCTGAT |
| | TACGACCGCTCACTCGTGGCAGCAACAGGGGAAAACCTTATTTATCAGCCGGAAAACCTACCGGATTGTTGGTAGTGGTCAATAGGCGATTACCGTTGTGTTGAAGTGGCGAGCGATACACCGCTTCCGGCGCGGATTGGCCTGA |
| | ACTGCCAACTGGCGCAGGTAGCAGAGCGGGTAAACTGGCTCGGATTAGGGCCGCAAGAAAACTATCCCGACCGCCTTACTGCCGCCTGTTTTGACCGCTGGGATCTGCCAAGTCAGACAGTATAGCCCGTACGTCTTCCCGAGCG |
| | AAAACGGTCTGCGCTGCGGGACGCGCGAATTGAATTTGGCCCACACCAGTGGCGCGGCGACTTCCAGTTCAATATCAGCCGCTACAGTGAACAGCAACTGTTGGAAACCAGCCTTCGCCAACTGCTGCACGCGGAAGAAGGCACT |
| | GGCTGAATATCGACGGTTTCCAGTTGGGGATTGGTGGCGACGACTCCTGGAGCCCGTCAGTATCGGCGGACTTCCAACTGAGCGCCGGTCGCTACCTTACCAGTTGGTCTGGTGTCAAAAAGCGTCCGCTTGAGTCTAGCGATCG |
| | CGCGCAGATCTGTCATGTGAGCAAAAGGCCAGCAAAAGGCCAGGAACCGTAAAAAGGCCGCGTTGCTGGCGTTTTTCCATAGGCTCCGCCCCCCTGACGAGCATCACAAAAATCGACGCTCAAGTCAGAGGTGGCGAAACCCGAC |
| | AGGACTATAAAGATACCAGGCGTTTCCCCCTGGAAGCTCCCTCGTGCGCTCTCCTGTTCCGACCCTGCCGCTTACCGGATACCTGTCCGCCTTTCTCCCTTCGGGAAGCGTGGCGCTTTCTCATAGCTCACGCTGTAGGTATCTC |
| | AGTTCGGTGTAGGTCGTTCGCTCCAAGCTGGGCTGTGTGCACGAACCCCCCGTTCAGCCCGACCGCTGCGCCTTATCCGGTAACTATCGTCTTGAGTCCAACCCGGTAAGACACGACTTATCGCCACTGGCAGCAGCCACTGGTA |
| | ACAGGATTAGCAGAGCGAGGTATGTAGGCGGTGCTACAGAGTTCTTGAAGTGGTGGCCTAACTACGGCTACACTAGAAGAACAGTATTTGGTATCTGCGCTCTGCTGAAGCCAGTTACCTTCGGAAAAAGAGTTGGTAGCTCTTG |
| | ATCCGGCAAACAAACCACCGCTGGTAGCGGTGGTTTTTTTGTTTGCAAGCAGCAGATTACGCGCAGAAAAAAAGGATCTCAAGAAGATCCTTTGATCTTTTCTACGGGGTCTGACGCTCAGTGGAACGAAAACTCACGTTAAGGG |
| | ATTTTGGTCATGAGATTATCAAAAAGGATCTTCACCTAGATCCTTTTCACGTAGAAAGCCAGTCCGCAGAAACGGTGCTGACCCCGGATGAATGTCAGCTACTGGGCTATCTGGACAAGGGAAAACGCAAGCGCAAAGAGAAAGC |
| | AGGTAGCTTGCAGTGGGCTTACATGGCGATAGCTAGACTGGGCGGTTTTATGGACAGCAAGCGAACCGGAATTGCCAGCTGGGGCGCCCTCTGGTAAGGTTGGGAAGCCCTGCAAAGTAAACTGGATGGCTTTCTTGCCGCCAAG |
| | GATCTGATGGCGCAGGGGATCAAGATCTGATCAAGAGACAGGATGAGGATCGTTTCGCATGATTGAACAAGATGGATTGCACGCAGGTTCTCCGGCCGCTTGGGTGGAGAGGCTATTCGGCTATGACTGGGCACAACAGACAATC |
| | GGCTGCTCTGATGCCGCCGTGTTCCGGCTGTCAGCGCAGGGGCGCCCGGTTCTTTTTGTCAAGACCGACCTGTCCGGTGCCCTGAATGAACTGCAAGACGAGGCAGCGCGGCTATCGTGGCTGGCCACGACGGGCGTTCCTTGCG |
| | CAGCTGTGCTCGACGTTGTCACTGAAGCGGGAAGGGACTGGCTGCTATTGGGCGAAGTGCCGGGGCAGGATCTCCTGTCATCTCACCTTGCTCCTGCCGAGAAAGTATCCATCATGGCTGATGCAATGCGGCGGCTGCATACGCT |
| | TGATCCGGCTACCTGCCCATTCGACCACCAAGCGAAACATCGCATCGAGCGAGCACGTACTCGGATGGAAGCCGGTCTTGTCGATCAGGATGATCTGGACGAAGAGCATCAGGGGCTCGCGCCAGCCGAACTGTTCGCCAGGCTC |
| | AAGGCGAGCATGCCCGACGGCGAGGATCTCGTCGTGACCCATGGCGATGCCTGCTTGCCGAATATCATGGTGGAAAATGGCCGCTTTTCTGGATTCATCGACTGTGGCCGGCTGGGTGTGGCGGACCGCTATCAGGACATAGCGT |
| | TGGCTACCCGTGATATTGCTGAAGAGCTTGGCGGCGAATGGGCTGACCGCTTCCTCGTGCTTTACGGTATCGCCGCTCCCGATTCGCAGCGCATCGCCTTCTATCGCCTTCTTGACGAGTTCTTCTGAATTTAAAGCCCAATACG |
| | CAAACCGCCTCTCCCCGCGCGTTGGCCGAAGCGGTTCAATATTTTGTTAAAATTCGCGTTAAATTTTTGTTAAATCAGCTATTTTTTAACCAATAGGCCGAAATCGGCAAAATCCCTTGTAAATCAAAAGAATAGACCGAGATAG |
| | GGTTGAGTGTTGTTCCAGTTTGGAACAAGAGTCCACTATTAAAGAACGTGGACTCCAACGTCAAAGGGCGAAAAACCGTCTATCAGGGCGTTGGCCCACTACGTGAACCTTCACCCTAATCAAGTTTTTTGGGGTCGAGGTGCCG |
| | TAAAGCACTAAATCGGAACCCTAAAGGGAGCCCCCGATTTAGAGCTTGACGGGGAAACCGGCGAACGTGGCGAGAAAGGAAGGGAAGAAAGCGAAAGGAGCGGGCGCTAGGGCGCTGGCAAGTGTAGCGGTCACGCTGCGCGTAA |
| | CCACCACACCCGCCGCGCTAAGCGCCGCTACAGGGCGCGTCCCTTCGCCTTCAGGCTGCGTCGAGTACTGTACTGTGAGCCAGAGTTGCCCGGCGCTCTCCGGCTGCGGTAGTTCAGGCAGTTCAATCAACTGTTTACCTTGTGG |
| | AGCGACTCCAGAGGCACTTCACCGCTTGCCAGCGGCTTACGATCCAGCGCCACGATCCAGTGCAGGAGATCGTTATCGCTATACGGAACAGGTATTCGCTGGTCACTTCGATAAGGTTTGCCCGGATAAACGGAACTGGAAAAAC |
| | TGCTGCTGGTGTTTTGCTTCCGTCAGTGCTGGATCGGCGTGCGGTCGGCAAAGACCAGACCGTTCTAACAGAACTGGCGATTGTTCGGCGTATCGCCAAAATCACCGCCGTAAGCCGACCACGGGTTGCCGTTTTCAGCAGGATT |
| | TAATCAGCGACTGATCCACCCAGTCCCAGACGAAGCCGCCCTGTAAACGGGGATACTGACGAAACGCCTGCCAGTATTTAGCGAAACCGCCAAGACTGTTACCCAAGCGTGGGCGTATTCGCAAAGGATCAGCGGGCGCGTCTCT |
| | CCAGGTAGCGAAAGCCTTTTTTGATCGACCTTTCGGCACAGCCGGGAAGGGCTGGTCTTCAACCACGCGCGCGTACAACGGGCAAATAATATCGGTGGCCGTGGTGTCGGCTCCGCCGCCTTCAACTGCACCGGGCGGGAAGGAT |
| | CGACAGATTTGATCCAGCGATACAGCGCGTCGTGATTAGCGCCGTGGCCTGATTCAATTCCCCAGCGACCAGTAGATCACACTCGGGTGATTACGATTGCGCTGCACCAGTCGCGTTACGGTTCGCTCTTCGCCGGTAGCCAGCG |
| | CGGATCACGGTCAGACGATTCGTTGGCACGATCCGTGGGTTTCAATACTGGCTTCAAACCACCACTAACAGGCCGTAGCGGTCGCACAGCGTGTACCACAGCGGTTGGTTCGGATAATCGAACAGCGCACGGCGTTAAAGTTGTT |
| | CTGCTTCAACAGCAGGATATTCTGCACCTTCGTCTGCTCTTCCTAACCTGACCAAGCAGAGGATCTGCTCGTGACGGTTAATCCTCGAATCAGCAACGGCTTGCCGTTCAGCAGCAGCAGACCAAGTTCAATCCGCACCTCGCGG |
| | AAACCGACAACGCAGGCTTCTGCTTCAATCAGCGTGCCGTCGGCGGTGTGCAGTTCAACCACCGCACGATAGAGATTCGGGATTTCGGCGCTCCACAGTTTCGGGTTTTCGACGTTCAGACGTAGTGTGACGCGATCTGCAAACC |
| | ACCACGCTCAACGATAATTTCACCGCCGAAAGGCGCGGTGCCGCTGGCGACCTGCGTTTCACCCTGCCAGAAAGAAACTGTTACCCGTAGGTAGTCACGCAACTCGCCGCACACTGAACTTCAGCCTCCAGTACAGCGCGGCTGA |
| | AATCGTCTTAAAGCGAGTGGCAACTGGAAATCGCTGATTTGTGTAGTCGGTTTAGCAGCAACGAGACTTCACGGAAAATCCGCTAATCCGCCACAGATCCTGATCTTCCAGATAACTGCCGTCACTCCAACGCAGCACCTTCACC |
| | GCGAGGCGGTTTTCTCCGGCGCGTAAAAATCGCTCAGGTCAAATTCAGACGGCAAACGACTGTCCTGGCCGTAACCGACCCAGCGCCCGTTGCACCACAGATTGAAACGCCGAGTTTACGCCTCAAAAATAATTCGCGTCTGGCC |
| | TTCCTGTAGCCAGCTTTCACAACTATAATAGTGAGCGAGTAACAACCCGTCGGATTCTCCGTGGGAACAAACGGCGGATTGACCGTATAGGGATAGGTTACGTTGGTGTAGTAGGGCGCTCCGTAACCGTGCTACTGCCAGTTTG |
| | AGGGGACGACGACAGTATCGGCCTCAGGAAGATCGCACTCCAGCCAGCTTTCCGGCACCGCTTCTGGTACTGGAAACCAGGCAAAGCGCCTATCGCCTATCAGGCTGCACAACTGTTGGGAAGGGCGATCTGTGCGGGCCTCTTC |
| | GCTATTACGCCAGCTTGCGAAAGGGGGTAGTGCTGCAAGGCGATTAAGTTGGGTAACGCCAGGGTTTTCCCAGTCACGACGTGGATCTGGGCCACTCCCTCT |
| 463 | > AAV3B CAPSID NUCLEOTIDE SEQUENCE |
| | ATGGCTGCTGACGGTTATCTTCCAGATTGGCTCGAGGACAACCTTTCTGAAGGCATTCGTGAGTGGTGGGCTCTGAAACCTGGAGTCCCTCAACCCAAAGCGAACCAACAACACCAGGACAACCGTCGGGGTCTTGTGCTTCCGG |
| | GTTACAAATACCTCGGACCCGGTAACGGACTCGACAAAGGAGAGCCGGTCAACGAGGCGGACGCGGCAGCCCTCGAACACGACAAAGCTTACGACCAGCAGCTCAAGGCCGGTGACAACCCGTACCTCAAGTACAACCACGCCGA |
| | CGCCGAGTTTCAGGAGCGTCTTCAAGAAGATACGTCTTTTGGGGGCAACCTTGGCAGAGCAGTCTTCCAGGCCAAAAAGAGGATCCTTGAGCCTCTTGGTCTGGTTGAGGAAGCAGCTAAAACGGCTCCTGGAAAGAAGAGGCCT |
| | GTAGATCAGTCTCCTCAGGAACCGGACTCATCATCTGGTGTTGGCAAATCGGGCAAACAGCCTGCCAGAAAAAGACTAAATTTCGGTCAGACTGGCGACTCAGAGTCAGTCCCAGACCCTCAACCTCTCGGAGAACCACCAGCAG |
| | CCCCCACAAGTTTGGGATCTAATACAATGGCTTCAGGCGGTGGCGCACCAATGGCAGACAATAACGAGGGTGCCGATGGAGTGGGTAATTCCTCAGGAAATTGGCATTGCGATTCCCAATGGCTGGGCGACAGAGTCATCACCAC |
| | CAGCACCAGAACCTGGGCCCTGCCCACTTACAACAACCATCTCTACAAGCAAATCTCCAGCCAATCAGGAGCTTCAAACGACAACCACTACTTTGGCTACAGCACCCCTTGGGGGTATTTTGACTTTAACAGATTCCACTGCCAC |
| | TTCTCACCACGTGACTGGCAGCGACTCATTAACAACAACTGGGGATTCCGGCCCAAGAAACTCAGCTTCAAGCTCTTCAACATCCAAGTTAAAGAGGTCACGCAGAACGATGGCACGACGACTATTGCCAATAACCTTACCAGCA |
| | CGGTTCAAGTGTTTACGGACTCGGAGTATCAGCTCCCGTACGTGCTCGGGTCGGCGCACCAAGGCTGTCTCCCGCCGTTTCCAGCGGACGTCTTCATGGTCCCTCAGTATGGATACCTCACCCTGAACAACGGAAGTCAAGCGGT |
| | GGGACGCTCATCCTTTTACTGCCTGGAGTACTTCCCTTCGCAGATGCTAAGGACTGGAAATAACTTCCAATTCAGCTATACCTTCGAGGATGTACCTTTTCACAGCAGCTACGCTCACAGCCAGAGTTTGGATCGCTTGATGAAT |
| | CCTCTTATTGATCAGTATCTGTACTACCTGAACAGAACGCAAGGAACAACCTCTGGAACAACCAACCAATCACGGCTGCTTTTTAGCCAGGCTGGGCCTCAGTCTATGTCTTTGCAGGCCAGAAATTGGCTACCTGGGCCCTGCT |
| | ACCGGCAACAGAGACTTTCAAAGACTGCTAACGACAACAACAACAGTAACTTTCCTTGGACAGCGGCCAGCAAATATCATCTCAATGGCCGCGACTCGCTGGTGAATCCAGGACCAGCTATGGCCAGTCACAAGGACGATGAAGA |
| | AAAATTTTTCCCTATGCACGGCAATCTAATATTTGGCAAAGAAGGGACAACGGCAAGTAACGCAGAATTAGATAATGTAATGATTACGGATGAAGAAGAGATTCGTACCACCAATCCTGTGGCAACAGAGCAGTATGGAACTGTG |
| | GCAAATAACTTGCAGAGCTCAAATACAGCTCCCACGACTAGAACTGTCAATGATCAGGGGGCCTTACCTGGCATGGTGTGGCAAGATCGTGACGTGTACCTTCAAGGACCTATCTGGGCAAAGATTCCTCACACGGATGGACACT |
| | TTCATCCTTCTCCTCTGATGGGAGGCTTTGGACTGAAACATCCGCCTCCTCAAATCATGATCAAAAATACTCCGGTACCGGCAAATCCTCCGACGACTTTCAGCCCGGCCAAGTTTGCTTCATTTATCACTCAGTACTCCACTGG |
| | ACAGGTCAGCGTGGAAATTGAGTGGGAGCTACAGAAAGAAAACAGCAAACGTTGGAATCCAGAGATTCAGTACACTTCCAACTACAACAAGTCTGTTAATGTGGACTTTACTGTAGACACTAATGGTGTTTATAGTGAACCTCGC |
| | CCTATTGGAACCCGGTATCTCACACGAAACTTG |
| 452 | > AAV3B CAPSID AMINO ACID SEQUENCE |
| | MAADGYLPDWLEDNLSEGIREWWALKPGVPQPKANQQHQDNRRGLVLPGYKYLGPGNGLDKGEPVNEADAAALEHDKAYDQQLKAGDNPYLKYNHADAEFQERLQEDTSFGGNLGRAVFQAKKRILEPLGLVEEAAKTAPGKKRP |
| | VDQSPQEPDSSSGVGKSGKQPARKRLNFGQTGDSESVPDPQPLGEPPAAPTSLGSNTMASGGGAPMADNNEGADGVGNSSGNWHCDSQWLGDRVITTSTRTWALPTYNNHLYKQISSQSGASNDNHYFGYSTPWGYFDFNRFHCH |
| | FSPRDWQRLINNNWGFRPKKLSFKLFNIQVKEVTQNDGTTTIANNLTSTVQVFTDSEYQLPYVLGSAHQGCLPPFPADVFMVPQYGYLTLNNGSQAVGRSSFYCLEYFPSQMLRTGNNFQFSYTFEDVPFHSSYAHSQSLDRLMN |
| | PLIDQYLYYLNRTQGTTSGTTNQSRLLFSQAGPQSMSLQARNWLPGPCYRQQRLSKTANDNNNSNFPWTAASKYHLNGRDSLVNPGPAMASHKDDEEKFFPMHGNLIFGKEGTTASNAELDNVMITDEEEIRTTNPVATEQYGTV |
| | ANNLQSSNTAPTTRTVNDQGALPGMVWQDRDVYLQGPIWAKIPHTDGHFHPSPLMGGFGLKHPPPQIMIKNTPVPANPPTTFSPAKFASFITQYSTGQVSVEIEWELQKENSKRWNPEIQYTSNYNKSVNVDFTVDTNGVYSEPR |
| | PIGTRYLTRNL |
| 453 | > AAV3B 265D CAPSID NUCLEOTIDE SEQUENCE |
| | ATGGCTGCTGACGGTTATCTTCCAGATTGGCTCGAGGACAACCTTTCTGAAGGCATTCGTGAGTGGTGGGCTCTGAAACCTGGAGTCCCTCAACCCAAAGCGAACCAACAACACCAGGACAACCGTCGGGGTCTTGTGCTTCCGG |
| | GTTACAAATACCTCGGACCCGGTAACGGACTCGACAAAGGAGAGCCGGTCAACGAGGCGGACGCGGCAGCCCTCGAACACGACAAAGCTTACGACCAGCAGCTCAAGGCCGGTGACAACCCGTACCTCAAGTACAACCACGCCGA |
| | CGCCGAGTTTCAGGAGCGTCTTCAAGAAGATACGTCTTTTGGGGGCAACCTTGGCAGAGCAGTCTTCCAGGCCAAAAAGAGGATCCTTGAGCCTCTTGGTCTGGTTGAGGAAGCAGCTAAAACGGCTCCTGGAAAGAAGAGGCCT |
| | GTAGATCAGTCTCCTCAGGAACCGGACTCATCATCTGGTGTTGGCAAATCGGGCAAACAGCCTGCCAGAAAAAGACTAAATTTCGGTCAGACTGGCGACTCAGAGTCAGTCCCAGACCCTCAACCTCTCGGAGAACCACCAGCAG |
| | CCCCCACAAGTTTGGGATCTAATACAATGGCTTCAGGCGGTGGCGCACCAATGGCAGACAATAACGAGGGTGCCGATGGAGTGGGTAATTCCTCAGGAAATTGGCATTGCGATTCCCAATGGCTGGGCGACAGAGTCATCACCAC |
| | CAGCACCAGAACCTGGGCCCTGCCCACTTACAACAACCATCTCTACAAGCAAATCTCCAGCCAATCAGATGCTTCAAACGACAACCACTACTTTGGCTACAGCACCCCTTGGGGGTATTTTGACTTTAACAGATTCCACTGCCAC |
| | TTCTCACCACGTGACTGGCAGCGACTCATTAACAACAACTGGGGATTCCGGCCCAAGAAACTCAGCTTCAAGCTCTTCAACATCCAAGTTAAAGAGGTCACGCAGAACGATGGCACGACGACTATTGCCAATAACCTTACCAGCA |
| | CGGTTCAAGTGTTTACGGACTCGGAGTATCAGCTCCCGTACGTGCTCGGGTCGGCGCACCAAGGCTGTCTCCCGCCGTTTCCAGCGGACGTCTTCATGGTCCCTCAGTATGGATACCTCACCCTGAACAACGGAAGTCAAGCGGT |
| | GGGACGCTCATCCTTTTACTGCCTGGAGTACTTCCCTTCGCAGATGCTAAGGACTGGAAATAACTTCCAATTCAGCTATACCTTCGAGGATGTACCTTTTCACAGCAGCTACGCTCACAGCCAGAGTTTGGATCGCTTGATGAAT |
| | CCTCTTATTGATCAGTATCTGTACTACCTGAACAGAACGCAAGGAACAACCTCTGGAACAACCAACCAATCACGGCTGCTTTTTAGCCAGGCTGGGCCTCAGTCTATGTCTTTGCAGGCCAGAAATTGGCTACCTGGGCCCTGCT |
| | ACCGGCAACAGAGACTTTCAAAGACTGCTAACGACAACAACAACAGTAACTTTCCTTGGACAGCGGCCAGCAAATATCATCTCAATGGCCGCGACTCGCTGGTGAATCCAGGACCAGCTATGGCCAGTCACAAGGACGATGAAGA |
| | AAAATTTTTCCCTATGCACGGCAATCTAATATTTGGCAAAGAAGGGACAACGGCAAGTAACGCAGAATTAGATAATGTAATGATTACGGATGAAGAAGAGATTCGTACCACCAATCCTGTGGCAACAGAGCAGTATGGAACTGTG |
| | GCAAATAACTTGCAGAGCTCAAATACAGCTCCCACGACTAGAACTGTCAATGATCAGGGGGCCTTACCTGGCATGGTGTGGCAAGATCGTGACGTGTACCTTCAAGGACCTATCTGGGCAAAGATTCCTCACACGGATGGACACT |
| | TTCATCCTTCTCCTCTGATGGGAGGCTTTGGACTGAAACATCCGCCTCCTCAAATCATGATCAAAAATACTCCGGTACCGGCAAATCCTCCGACGACTTTCAGCCCGGCCAAGTTTGCTTCATTTATCACTCAGTACTCCACTGG |
| | ACAGGTCAGCGTGGAAATTGAGTGGGAGCTACAGAAAGAAAACAGCAAACGTTGGAATCCAGAGATTCAGTACACTTCCAACTACAACAAGTCTGTTAATGTGGACTTTACTGTAGACACTAATGGTGTTTATAGTGAACCTCGC |
| | CCTATTGGAACCCGGTATCTCACACGAAACTTG |
| 454 | > AAV3B 265D CAPSID AMINO ACID |
| | MAADGYLPDWLEDNLSEGIREWWALKPGVPQPKANQQHQDNRRGLVLPGYKYLGPGNGLDKGEPVNEADAAALEHDKAYDQQLKAGDNPYLKYNHADAEFQERLQEDTSFGGNLGRAVFQAKKRILEPLGLVEEAAKTAPGKKRP |
| | VDQSPQEPDSSSGVGKSGKQPARKRLNFGQTGDSESVPDPQPLGEPPAAPTSLGSNTMASGGGAPMADNNEGADGVGNSSGNWHCDSQWLGDRVITTSTRIWALPTYNNHLYKQISSQSDASNDNHYFGYSTPWGYFFENRFHCH |
| | FSPRDWQRLINNNWGFRPKKLSFKLFNIQVKEVTQNDGTTTIANNLTSTVQVFTDSEYQLPYVLGSAHQGCLPPFPADVFMVPQYGYLTLNNGSQAVGRSSFYCLEYFPSQMLRTGNNFQFSYTFEDVPFHSSYAHSQSLDRLMN |
| | PLIDQYLYYLNRTQGTTSGTTNQSRLLFSQAGPQSMSLQARNWLPGPCYRQQRLSKTANDNNNSNFPWTAASKYHLNGRDSLVNPGPAMASHKDDEEKFFPMHGNLIFGKEGTTASNAELDNVMITDEEEIRTTNPVATEQYGTV |
| | ANNLQSSNTAPTTRTVNDQGALPGMVWQDRDVYLQGPIWAKIPHTDGHFHPSPLMGGFGLKHPPPQIMIKNTPVPANPPTTFSPAKFASFITQYSTGQVSVEIEWELQKENSKRWNPEIQYTSNYNKSVNVDFTVDTNGVYSEPR |
| | PIGTRYLTRNL |
| 455 | > AAV3B ST (S663V + T492V) CAPSID NUCLEOTIDE SEQUENCE |
| | ATGGCTGCTGACGGTTATCTTCCAGATTGGCTCGAGGACAACCTTTCTGAAGGCATTCGTGAGTGGTGGGCTCTGAAACCTGGAGTCCCTCAACCCAAAGCGAACCAACAACACCAGGACAACCGTCGGGGTCTTGTGCTTCCGG |
| | GTTACAAATACCTCGGACCCGGTAACGGACTCGACAAAGGAGAGCCGGTCAACGAGGCGGACGCGGCAGCCCTCGAACACGACAAAGCTTACGACCAGCAGCTCAAGGCCGGTGACAACCCGTACCTCAAGTACAACCACGCCGA |
| | CGCCGAGTTTCAGGAGCGTCTTCAAGAAGATACGTCTTTTGGGGGCAACCTTGGCAGAGCAGTCTTCCAGGCCAAAAAGAGGATCCTTGAGCCTCTTGGTCTGGTTGAGGAAGCAGCTAAAACGGCTCCTGGAAAGAAGAGGCCT |
| | GTAGATCAGTCTCCTCAGGAACCGGACTCATCATCTGGTGTTGGCAAATCGGGCAAACAGCCTGCCAGAAAAAGACTAAATTTCGGTCAGACTGGCGACTCAGAGTCAGTCCCAGACCCTCAACCTCTCGGAGAACCACCAGCAG |
| | CCCCCACAAGTTTGGGATCTAATACAATGGCTTCAGGCGGTGGCGCACCAATGGCAGACAATAACGAGGGTGCCGATGGAGTGGGTAATTCCTCAGGAAATTGGCATTGCGATTCCCAATGGCTGGGCGACAGAGTCATCACCAC |
| | CAGCACCAGAACCTGGGCCCTGCCCACTTACAACAACCATCTCTACAAGCAAATCTCCAGCCAATCAGATGCTTCAAACGACAACCACTACTTTGGCTACAGCACCCCTTGGGGGTATTTTGACTTTAACAGATTCCACTGCCAC |
| | TTCTCACCACGTGACTGGCAGCGACTCATTAACAACAACTGGGGATTCCGGCCCAAGAAACTCAGCTTCAAGCTCTTCAACATCCAAGTTAAAGAGGTCACGCAGAACGATGGCACGACGACTATTGCCAATAACCTTACCAGCA |
| | CGGTTCAAGTGTTTACGGACTCGGAGTATCAGCTCCCGTACGTGCTCGGGTCGGCGCACCAAGGCTGTCTCCCGCCGTTTCCAGCGGACGTCTTCATGGTCCCTCAGTATGGATACCTCACCCTGAACAACGGAAGTCAAGCGGT |
| | GGGACGCTCATCCTTTTACTGCCTGGAGTACTTCCCTTCGCAGATGCTAAGGACTGGAAATAACTTCCAATTCAGCTATACCTTCGAGGATGTACCTTTTCACAGCAGCTACGCTCACAGCCAGAGTTTGGATCGCTTGATGAAT |
| | CCTCTTATTGATCAGTATCTGTACTACCTGAACAGAACGCAAGGAACAACCTCTGGAACAACCAACCAATCACGGCTGCTTTTTAGCCAGGCTGGGCCTCAGTCTATGTCTTTGCAGGCCAGAAATTGGCTACCTGGGCCCTGCT |
| | ACCGGCAACAGAGACTTTCAAAGGTAGCTAACGACAACAACAACAGTAACTTTCCTTGGACAGCGGCCAGCAAATATCATCTCAATGGCCGCGACTCGCTGGTGAATCCAGGACCAGCTATGGCCAGTCACAAGGACGATGAAGA |
| | AAAATTTTTCCCTATGCACGGCAATCTAATATTTGGCAAAGAAGGGACAACGGCAAGTAACGCAGAATTAGATAATGTAATGATTACGGATGAAGAAGAGATTCGTACCACCAATCCTGTGGCAACAGAGCAGTATGGAACTGTG |
| | GCAAATAACTTGCAGAGCTCAAATACAGCTCCCACGACTAGAACTGTCAATGATCAGGGGGCCTTACCTGGCATGGTGTGGCAAGATCGTGACGTGTACCTTCAAGGACCTATCTGGGCAAAGATTCCTCACACGGATGGACACT |
| | TTCATCCTTCTCCTCTGATGGGAGGCTTTGGACTGAAACATCCGCCTCCTCAAATCATGATCAAAAATACTCCGGTACCGGCAAATCCTCCGACGACTTTCGTACCGGCCAAGTTTGCTTCATTTATCACTCAGTACTCCACTGG |
| | ACAGGTCAGCGTGGAAATTGAGTGGGAGCTACAGAAAGAAAACAGCAAACGTTGGAATCCAGAGATTCAGTACACTTCCAACTACAACAAGTCTGTTAATGTGGACTTTACTGTAGACACTAATGGTGTTTATAGTGAACCTCGC |
| | CCTATTGGAACCCGGTATCTCACACGAAACTTG |
| 456 | > AAV3B ST (S663V + T492V) AMINO ACID SEQUENCE |
| | MAADGYLPDWLEDNLSEGIREWWALKPGVPQPKANQQHQDNRRGLVLPGYKYLGPGNGLDKGEPVNEADAAALEHDKAYDQQLKAGDNPYLKYNHADAEFQERLQEDTSFGGNLGRAVFQAKKRILEPLGLVEEAAKTAPGKKRP |
| | VDQSPQEPDSSSGVGKSGKQPARKRLNFGQTGDSESVPDPQPLGEPPAAPTSLGSNTMASGGGAPMADNNEGADGVGNSSGNWHCDSQWLGDRVITTSTRTWALPTYNNHLYKQISSQSGASNDNHYFGYSTPWGYFDFNRFHCH |
| | FSPRDWQRLINNNWGFRPKKLSFKLFNIQVKEVTQNDGTTTIANNLTSTVQVFTDSEYQLPYVLGSAHQGCLPPFPADVFMVPQYGYLTLNNGSQAVGRSSFYCLEYFPSQMLRTGNNFQFSYTFEDVPFHSSYAHSQSLDRLMN |
| | PLIDQYLYYLNRTQGTTSGTTNQSRLLFSQAGPQSMSLQARNWLPGPCYRQQRLSKVANDNNNSNFPWTAASKYHLNGRDSLVNPGPAMASHKDDEEKFFPMHGNLIFGKEGTTASNAELDNVMITDEEEIRTTNPVATEQYGTV |
| | ANNLQSSNTAPTTRTVNDQGALPGMVWQDRDVYLQGPIWAKIPHTDGHFHPSPLMGGFGLKHPPPQIMIKNTPVPANPPTTFVPAKFASFITQYSTGQVSVEIEWELQKENSKRWNPEIQYTSNYNKSVNVDFTVDTNGVYSEPR |
| | PIGTRYLTRNL |
| 457 | > AAV3B265D549A CAPSID NUCLEOTIDE SEQUENCE |
| | GAAACCTGGAGTCCCTCAACCCAAAGCGAACCAACAACACCAGGACAACCGTCGGGGTCTTGTGCTTCCGGGTTACAAATACCTCGGACCCGGTAACGGACTCGACAAAGGAGAGCCGGTCAACGAGGCGGACGCGGCAGCCCTC |
| | GAACACGACAAAGCTTACGACCAGCAGCTCAAGGCCGGTGACAACCCGTACCTCAAGTACAACCACGCCGACGCCGAGTTTCAGGAGCGTCTTCAAGAAGATACGTCTTTTGGGGGCAACCTTGGCAGAGCAGTCTTCCAGGCCA |
| | AAAAGAGGATCCTTGAGCCTCTTGGTCTGGTTGAGGAAGCAGCTAAAACGGCTCCTGGAAAGAAGAGGCCTGTAGATCAGTCTCCTCAGGAACCGGACTCATCATCTGGTGTTGGCAAATCGGGCAAACAGCCTGCCAGAAAAAG |
| | ACTAAATTTCGGTCAGACTGGCGACTCAGAGTCAGTCCCAGACCCTCAACCTCTCGGAGAACCACCAGCAGCCCCCACAAGTTTGGGATCTAATACAATGGCTTCAGGCGGTGGCGCACCAATGGCAGACAATAACGAGGGTGCC |
| | GATGGAGTGGGTAATTCCTCAGGAAATTGGCATTGCGATTCCCAATGGCTGGGCGACAGAGTCATCACCACCAGCACCAGAACCTGGGCCCTGCCCACTTACAACAACCATCTCTACAAGCAAATCTCCAGCCAATCAGGAGCTT |
| | CAAACGACAACCACTACTTTGGCTACAGCACCCCTTGGGGGTATTTTGACTTTAACAGATTCCACTGCCACTTCTCACCACGTGACTGGCAGCGACTCATTAACAACAACTGGGGATTCCGGCCCAAGAAACTCAGCTTCAAGCT |
| | CTTCAACATCCAAGTTAAAGAGGTCACGCAGAACGATGGCACGACGACTATTGCCAATAACCTTACCAGCACGGTTCAAGTGTTTACGGACTCGGAGTATCAGCTCCCGTACGTGCTCGGGTCGGCGCACCAAGGCTGTCTCCCG |
| | CCGTTTCCAGCGGACGTCTTCATGGTCCCTCAGTATGGATACCTCACCCTGAACAACGGAAGTCAAGCGGTGGGACGCTCATCCTTTTACTGCCTGGAGTACTTCCCTTCGCAGATGCTAAGGACTGGAAATAACTTCCAATTCA |
| | GCTATACCTTCGAGGATGTACCTTTTCACAGCAGCTACGCTCACAGCCAGAGTTTGGATCGCTTGATGAATCCTCTTATTGATCAGTATCTGTACTACCTGAACAGAACGCAAGGAACAACCTCTGGAACAACCAACCAATCACG |
| | GCTGCTTTTTAGCCAGGCTGGGCCTCAGTCTATGTCTTTGCAGGCCAGAAATTGGCTACCTGGGCCCTGCTACCGGCAACAGAGACTTTCAAAGACTGCTAACGACAACAACAACAGTAACTTTCCTTGGACAGCGGCCAGCAAA |
| | TATCATCTCAATGGCCGCGACTCGCTGGTGAATCCAGGACCAGCTATGGCCAGTCACAAGGACGATGAAGAAAAATTTTTCCCTATGCACGGCAATCTAATATTTGGCAAAGAAGGGACAACGGCAAGTAACGCAGAATTAGATA |
| | ATGTAATGATTACGGATGAAGAAGAGATTCGTACCACCAATCCTGTGGCAACAGAGCAGTATGGAACTGTGGCAAATAACTTGCAGAGCTCAAATACAGCTCCCACGACTAGAACTGTCAATGATCAGGGGGCCTTACCTGGCAT |
| | GGTGTGGCAAGATCGTGACGTGTACCTTCAAGGACCTATCTGGGCAAAGATTCCTCACACGGATGGACACTTTCATCCTTCTCCTCTGATGGGAGGCTTTGGACTGAAACATCCGCCTCCTCAAATCATGATCAAAAATACTCCG |
| | GTACCGGCAAATCCTCCGACGACTTTCAGCCCGGCCAAGTTTGCTTCATTTATCACTCAGTACTCCACTGGACAGGTCAGCGTGGAAATTGAGTGGGAGCTACAGAAAGAAAACAGCAAACGTTGGAATCCAGAGATTCAGTACA |
| | CTTCCAACTACAACAAGTCTGTTAATGTGGACTTTACTGTAGACACTAATGGTGTTTATAGTGAACCTCGCCCTATTGGAACCCGGTATCTCACACGAAACTTG |
| 458 | > AAV3B265D549A CAPSID AMINO ACID SEQUENCE |
| | MAADGYLPDWLEDNLSEGIREWWALKPGVPQPKANQQHQDNRRGLVLPGYKYLGPGNGLDKGEPVNEADAAALEHDKAYDQQLKAGDNPYLKYNHADAEFQERLQEDTSFGGNLGRAVFQAKKRILEPLGLVEEAAKTAPGKKRP |
| | VDQSPQEPDSSSGVGKSGKQPARKRLNFGQTGDSESVPDPQPLGEPPAAPTSLGSNTMASGGGAPMADNNEGADGVGNSSGNWHCDSQWLGDRVITTSTRTWALPTYNNHLYKQISSQSDASNDNHYFGYSTPWGYFDFNRFHCH |
| | FSPRDWQRLINNNWGFRPKKLSFKLFNIQVKEVTQNDGTTTIANNLTSTVQVFTDSEYQLPYVLGSAHQGCLPPFPADVFMVPQYGYLTLNNGSQAVGRSSFYCLEYFPSQMLRTGNNFQFSYTFEDVPFHSSYAHSQSLDRLMN |
| | PLIDQYLYYLNRTQGTTSGTTNQSRLLFSQAGPQSMSLQARNWLPGPCYRQQRLSKTANDNNNSNFPWTAASKYHLNGRDSLVNPGPAMASHKDDEEKFFPMHGNLIFGKEGTAASNAELDNVMITDEEEIRTTNPVATEQYGTV |
| | ANNLQSSNTAPTTRTVNDQGALPGMVWQDRDVYLQGPIWAKIPHTDGHFHPSPLMGGFGLKHPPPQIMIKNTPVPANPPTTFSPAKFASFITQYSTGQVSVEIEWELQKENSKRWNPEIQYTSNYNKSVNVDFTVDTNGVYSEPR |
| | PIGTRYLTRNL |
| 459 | > AAV3B549A CAPSID NUCLEOTIDE SEQUENCE |
| | ATGGCTGCTGACGGTTATCTTCCAGATTGGCTCGAGGACAACCTTTCTGAAGGCATTCGTGAGTGGTGGGCTCTGAAACCTGGAGTCCCTCAACCCAAAGCGAACCAACAACACCAGGACAACCGTCGGGGTCTTGTGCTTCCGG |
| | GTTACAAATACCTCGGACCCGGTAACGGACTCGACAAAGGAGAGCCGGTCAACGAGGCGGACGCGGCAGCCCTCGAACACGACAAAGCTTACGACCAGCAGCTCAAGGCCGGTGACAACCCGTACCTCAAGTACAACCACGCCGA |
| | CGCCGAGTTTCAGGAGCGTCTTCAAGAAGATACGTCTTTTGGGGGCAACCTTGGCAGAGCAGTCTTCCAGGCCAAAAAGAGGATCCTTGAGCCTCTTGGTCTGGTTGAGGAAGCAGCTAAAACGGCTCCTGGAAAGAAGAGGCCT |
| | GTAGATCAGTCTCCTCAGGAACCGGACTCATCATCTGGTGTTGGCAAATCGGGCAAACAGCCTGCCAGAAAAAGACTAAATTTCGGTCAGACTGGCGACTCAGAGTCAGTCCCAGACCCTCAACCTCTCGGAGAACCACCAGCAG |
| | CCCCCACAAGTTTGGGATCTAATACAATGGCTTCAGGCGGTGGCGCACCAATGGCAGACAATAACGAGGGTGCCGATGGAGTGGGTAATTCCTCAGGAAATTGGCATTGCGATTCCCAATGGCTGGGCGACAGAGTCATCACCAC |
| | CAGCACCAGAACCTGGGCCCTGCCCACTTACAACAACCATCTCTACAAGCAAATCTCCAGCCAATCAGGAGCTTCAAACGACAACCACTACTTTGGCTACAGCACCCCTTGGGGGTATTTTGACTTTAACAGATTCCACTGCCAC |
| | TTCTCACCACGTGACTGGCAGCGACTCATTAACAACAACTGGGGATTCCGGCCCAAGAAACTCAGCTTCAAGCTCTTCAACATCCAAGTTAAAGAGGTCACGCAGAACGATGGCACGACGACTATTGCCAATAACCTTACCAGCA |
| | CGGTTCAAGTGTTTACGGACTCGGAGTATCAGCTCCCGTACGTGCTCGGGTCGGCGCACCAAGGCTGTCTCCCGCCGTTTCCAGCGGACGTCTTCATGGTCCCTCAGTATGGATACCTCACCCTGAACAACGGAAGTCAAGCGGT |
| | GGGACGCTCATCCTTTTACTGCCTGGAGTACTTCCCTTCGCAGATGCTAAGGACTGGAAATAACTTCCAATTCAGCTATACCTTCGAGGATGTACCTTTTCACAGCAGCTACGCTCACAGCCAGAGTTTGGATCGCTTGATGAAT |
| | CCTCTTATTGATCAGTATCTGTACTACCTGAACAGAACGCAAGGAACAACCTCTGGAACAACCAACCAATCACGGCTGCTTTTTAGCCAGGCTGGGCCTCAGTCTATGTCTTTGCAGGCCAGAAATTGGCTACCTGGGCCCTGCT |
| | ACCGGCAACAGAGACTTTCAAAGACTGCTAACGACAACAACAACAGTAACTTTCCTTGGACAGCGGCCAGCAAATATCATCTCAATGGCCGCGACTCGCTGGTGAATCCAGGACCAGCTATGGCCAGTCACAAGGACGATGAAGA |
| | AAAATTTTTCCCTATGCACGGCAATCTAATATTTGGCAAAGAAGGGACAACGGCAAGTAACGCAGAATTAGATAATGTAATGATTACGGATGAAGAAGAGATTCGTACCACCAATCCTGTGGCAACAGAGCAGTATGGAACTGTG |
| | GCAAATAACTTGCAGAGCTCAAATACAGCTCCCACGACTAGAACTGTCAATGATCAGGGGGCCTTACCTGGCATGGTGTGGCAAGATCGTGACGTGTACCTTCAAGGACCTATCTGGGCAAAGATTCCTCACACGGATGGACACT |
| | TTCATCCTTCTCCTCTGATGGGAGGCTTTGGACTGAAACATCCGCCTCCTCAAATCATGATCAAAAATACTCCGGTACCGGCAAATCCTCCGACGACTTTCAGCCCGGCCAAGTTTGCTTCATTTATCACTCAGTACTCCACTGG |
| | ACAGGTCAGCGTGGAAATTGAGTGGGAGCTACAGAAAGAAAACAGCAAACGTTGGAATCCAGAGATTCAGTACACTTCCAACTACAACAAGTCTGTTAATGTGGACTTTACTGTAGACACTAATGGTGTTTATAGTGAACCTCGC |
| | CCTATTGGAACCCGGTATCTCACACGAAACTTG |
| 460 | > AAV3B549A CAPSID AMINO ACID SEQUENCE |
| | MAADGYLPDWLEDNLSEGIREWWALKPGVPQPKANQQHQDNRRGLVLPGYKYLGPGNGLDKGEPVNEADAAALEHDKAYDQQLKAGDNPYLKYNHADAEFQERLQEDTSFGGNLGRAVFQAKKRILEPLGLVEEAAKTAPGKKRP |
| | VDQSPQEPDSSSGVGKSGKQPARKRLNFGQTGDSESVPDPQPLGEPPAAPTSLGSNTMASGGGAPMADNNEGADGVGNSSGNWHCDSQWLGDRVITTSTRTWALPTYNNHLYKQISSQSGASNDNHYFGYSTPWGYFDFNRFHCH |
| | FSPRDWQRLINNNWGFRPKKLSFKLFNIQVKEVTQNDGTTTIANNLTSTVQVFTDSEYQLPYVLGSAHQGCLPPFPADVFMVPQYGYLTLNNGSQAVGRSSFYCLEYFPSQMLRTGNNFQFSYTFEDVPFHSSYAHSQSLDRLMN |
| | PLIDQYLYYLNRTQGTTSGTTNQSRLLFSQAGPQSMSLQARNWLPGPCYRQQRLSKTANDNNNSNFPWTAASKYHLNGRDSLVNPGPAMASHKDDEEKFFPMHGNLIFGKEGTAASNAELDNVMITDEEEIRTTNPVATEQYGTV |
| | ANNLQSSNTAPTTRTVNDQGALPGMVWQDRDVYLQGPIWAKIPHTDGHFHPSPLMGGFGLKHPPPQIMIKNTPVPANPPTTFSPAKFASFITQYSTGQVSVEIEWELQKENSKRWNPEIQYTSNYNKSVNVDFTVDTNGVYSEPR |
| | PIGTRYLTRNL |
| 461 | > AAV3BQ263Y CAPSID NUCLEOTIDE SEQUENCE |
| | ATGGCTGCTGACGGTTATCTTCCAGATTGGCTCGAGGACAACCTTTCTGAAGGCATTCGTGAGTGGTGGGCTCTGAAACCTGGAGTCCCTCAACCCAAAGCGAACCAACAACACCAGGACAACCGTCGGGGTCTTGTGCTTCCGG |
| | GTTACAAATACCTCGGACCCGGTAACGGACTCGACAAAGGAGAGCCGGTCAACGAGGCGGACGCGGCAGCCCTCGAACACGACAAAGCTTACGACCAGCAGCTCAAGGCCGGTGACAACCCGTACCTCAAGTACAACCACGCCGA |
| | CGCCGAGTTTCAGGAGCGTCTTCAAGAAGATACGTCTTTTGGGGGCAACCTTGGCAGAGCAGTCTTCCAGGCCAAAAAGAGGATCCTTGAGCCTCTTGGTCTGGTTGAGGAAGCAGCTAAAACGGCTCCTGGAAAGAAGAGGCCT |
| | GTAGATCAGTCTCCTCAGGAACCGGACTCATCATCTGGTGTTGGCAAATCGGGCAAACAGCCTGCCAGAAAAAGACTAAATTTCGGTCAGACTGGCGACTCAGAGTCAGTCCCAGACCCTCAACCTCTCGGAGAACCACCAGCAG |
| | CCCCCACAAGTTTGGGATCTAATACAATGGCTTCAGGCGGTGGCGCACCAATGGCAGACAATAACGAGGGTGCCGATGGAGTGGGTAATTCCTCAGGAAATTGGCATTGCGATTCCCAATGGCTGGGCGACAGAGTCATCACCAC |
| | CAGCACCAGAACCTGGGCCCTGCCCACTTACAACAACCATCTCTACAAGCAAATCTCCAGCCAATCAGGAGCTTCAAACGACAACCACTACTTTGGCTACAGCACCCCTTGGGGGTATTTTGACTTTAACAGATTCCACTGCCAC |
| | TTCTCACCACGTGACTGGCAGCGACTCATTAACAACAACTGGGGATTCCGGCCCAAGAAACTCAGCTTCAAGCTCTTCAACATCCAAGTTAAAGAGGTCACGCAGAACGATGGCACGACGACTATTGCCAATAACCTTACCAGCA |
| | CGGTTCAAGTGTTTACGGACTCGGAGTATCAGCTCCCGTACGTGCTCGGGTCGGCGCACCAAGGCTGTCTCCCGCCGTTTCCAGCGGACGTCTTCATGGTCCCTCAGTATGGATACCTCACCCTGAACAACGGAAGTCAAGCGGT |
| | GGGACGCTCATCCTTTTACTGCCTGGAGTACTTCCCTTCGCAGATGCTAAGGACTGGAAATAACTTCCAATTCAGCTATACCTTCGAGGATGTACCTTTTCACAGCAGCTACGCTCACAGCCAGAGTTTGGATCGCTTGATGAAT |
| | CCTCTTATTGATCAGTATCTGTACTACCTGAACAGAACGCAAGGAACAACCTCTGGAACAACCAACCAATCACGGCTGCTTTTTAGCCAGGCTGGGCCTCAGTCTATGTCTTTGCAGGCCAGAAATTGGCTACCTGGGCCCTGCT |
| | ACCGGCAACAGAGACTTTCAAAGACTGCTAACGACAACAACAACAGTAACTTTCCTTGGACAGCGGCCAGCAAATATCATCTCAATGGCCGCGACTCGCTGGTGAATCCAGGACCAGCTATGGCCAGTCACAAGGACGATGAAGA |
| | AAAATTTTTCCCTATGCACGGCAATCTAATATTTGGCAAAGAAGGGACAACGGCAAGTAACGCAGAATTAGATAATGTAATGATTACGGATGAAGAAGAGATTCGTACCACCAATCCTGTGGCAACAGAGCAGTATGGAACTGTG |
| | GCAAATAACTTGCAGAGCTCAAATACAGCTCCCACGACTAGAACTGTCAATGATCAGGGGGCCTTACCTGGCATGGTGTGGCAAGATCGTGACGTGTACCTTCAAGGACCTATCTGGGCAAAGATTCCTCACACGGATGGACACT |
| | TTCATCCTTCTCCTCTGATGGGAGGCTTTGGACTGAAACATCCGCCTCCTCAAATCATGATCAAAAATACTCCGGTACCGGCAAATCCTCCGACGACTTTCAGCCCGGCCAAGTTTGCTTCATTTATCACTCAGTACTCCACTGG |
| | ACAGGTCAGCGTGGAAATTGAGTGGGAGCTACAGAAAGAAAACAGCAAACGTTGGAATCCAGAGATTCAGTACACTTCCAACTACAACAAGTCTGTTAATGTGGACTTTACTGTAGACACTAATGGTGTTTATAGTGAACCTCGC |
| | CCTATTGGAACCCGGTATCTCACACGAAACTTG |
| 462 | > AAV3BQ263Y CAPSID AMINO ACID SEQUENCE |
| | MAADGYLPDWLEDNLSEGIREWWALKPGVPQPKANQQHQDNRRGLVLPGYKYLGPGNGLDKGEPVNEADAAALEHDKAYDQQLKAGDNPYLKYNHADAEFQERLQEDTSFGGNLGRAVFQAKKRILEPLGLVEEAAKTAPGKKRP |
| | VDQSPQEPDSSSGVGKSGKQPARKRLNFGQTGDSESVPDPQPLGEPPAAPTSLGSNTMASGGGAPMADNNEGADGVGNSSGNWHCDSQWLGDRVITTSTRTWALPTYNNHLYKQISSYSGASNDNHYFGYSTPWGYFDFNRFHCH |
| | FSPRDWQRLINNNWGFRPKKLSFKLFNIQVKEVTQNDGTTTIANNLTSTVQVFTDSEYQLPYVLGSAHQGCLPPFPADVFMVPQYGYLTLNNGSQAVGRSSFYCLEYFPSQMLRTGNNFQFSYTFEDVPFHSSYAHSQSLDRLMN |
| | PLIDQYLYYLNRTQGTTSGTTNQSRLLFSQAGPQSMSLQARNWLPGPCYRQQRLSKTANDNNNSNFPWTAASKYHLNGRDSLVNPGPAMASHKDDEEKFFPMHGNLIFGKEGTTASNAELDNVMITDEEEIRTTNPVATEQYGTV |
| | ANNLQSSNTAPTTRTVNDQGALPGMVWQDRDVYLQGPIWAKIPHTDGHFHPSPLMGGFGLKHPPPQIMIKNTPVPANPPTTFSPAKFASFITQYSTGQVSVEIEWELQKENSKRWNPEIQYTSNYNKSVNVDFTVDTNGVYSEPR |
| | PIGTRYLTRNL |
| 463 | > pP112 |
| | CTGCGCGCTCGCTCGCTCACTGAGGCCGCCCGGGCAAAGCCCGGGCGTCGGGCGACCTTTGGTCGCCCGGCCTCAGTGAGCGAGCGAGCGCGCAGAGAGGGAGTGGCCAACTCCATCACTAGGGGTTCCTGGAGGGGTGGAGTCG |
| | TGACGTGAATTACGTCATAGGGTTAGGGAGGTCGGCCGCTCTAGGAGTTAATTTTTAAAAAGCAGTCAAAAGTCCAAGTGCCCTTGCGAGCATTTACTCTCTCTGTTTGCTCTGGTTAATAATCTCAGGAGCACAAACATTCCTT |
| | ACTAGTTCTAGGAGTTAATTTTTAAAAAGCAGTCAAAAGTCCAAGTGCCCTTGCGAGCATTTACTCTCTCTGTTTGCTCTGGTTAATAATCTCAGGAGCACAAACATTCCTTACTAGTTCTAGAGCGGCCGCCAGTGTGCTGGAA |
| | TTCGGCTTTTTTAGGGCTGGAAGCTACCTTTGACATCATTTCCTCTGCGAATGCATGTATAATTTCTACAGAACCTATTAGAAAGGATCACCCAGCCTCTGCTTTTGTACAACTTTCCCTTAAAAAACTGCCAATCCCACTGCTG |
| | TTTGGCCCAATAGTGAGAACTTTTTCCTGCTGCCTCTTGGTGCTTTTGCCTATGGCCCCTATTCTGCCTGCTGAAGACACTCTTGCCAGCATGGACTTAAACCCCTCCAGCTCTGACAATCCTCTTTCTCTTTTGTTTTACATGA |
| | AGGGTCTGGCAGCCAAAGCAATCACTCAAAGTTCAAACCTTATCATTTTTTGCTTTGTTCCTCTTGGCCTTGGTTTTGTACATCAGCTTTGAAAATACCATCCCAGGGTTAATGCTGGGGTTAATTTATAACTGAGAGTGCTCTA |
| | GTTCTGCAATACAGGACATGCTATAAAAATGGAAAGATGTTGCTTTCTGAGAGATCAGCTTACATGTGGTACCGAGCTCGGATCCACTAGTAACGGCCGCCAGTGTGCTGGAATTCGGCTTTCCAGGCCATCTCCAACCATGGGA |
| | GTGAGGCACCCGCCCTGCTCCCACCGGCTCCTGGCCGTCTGCGCCCTCGTGTCCTTGGCAACCGCTGCACTCCTGGAGTTTGGGCTGAGCTGGGTCTTTCTGGTGGCCCTGCTGAAGGGAGTCCAGTGTGAGCAGCAGGGAGCCA |
| | GCAGACCAGGGCCCCGGGATGCCCAGGCACACCCCGGCCGTCCCAGAGCAGTGCCCACACAGTGCGACGTCCCCCCCAACAGCCGCTTCGATTGCGCCCCTGACAAGGCCATCACCCAGGAACAGTGCGAGGCCCGCGGCTGCTG |
| | CTACATCCCTGCAAAGCAGGGGCTGCAGGGAGCCCAGATGGGGCAGCCCTGGTGCTTCTTCCCACCCAGCTACCCCAGCTACAAGCTGGAGAACCTGAGCTCCTCTGAAATGGGCTACACGGCCACCCTGACCCGTACCACCCCC |
| | ACCTTCTTCCCCAAGGACATCCTGACCCTGCGGCTGGACGTGATGATGGAGACTGAGAACCGCCTCCACTTCACGATCAAAGATCCAGCTAACAGGCGCTACGAGGTGCCCTTGGAGACCCCGCGTGTCCACAGCCGGGCACCGT |
| | CCCCACTCTACAGCGTGGAGTTCTCCGAGGAGCCCTTCGGGGTGATCGTGCACCGGCAGCTGGACGGCCGCGTGCTGCTGAACACGACGGTGGCGCCCCTGTTCTTTGCGGACCAGTTCCTTCAGCTGTCCACCTCGCTGCCCTC |
| | GCAGTATATCACAGGCCTCGCCGAGCACCTCAGTCCCCTGATGCTCAGCACCAGCTGGACCAGGATCACCCTGTGGAACCGGGACCTTGCGCCCACGCCCGGTGCGAACCTCTACGGGTCTCACCCTTTCTACCTGGCGCTGGAG |
| | GACGGCGGGTCGGCACACGGGGTGTTCCTGCTAAACAGCAATGCCATGGATGTGGTCCTGCAGCCGAGCCCTGCCCTTAGCTGGAGGTCGACAGGTGGGATCCTGGATGTCTACATCTTCCTGGGCCCAGAGCCCAAGAGCGTGG |
| | TGCAGCAGTACCTGGACGTTGTGGGATACCCGTTCATGCCGCCATACTGGGGCCTGGGCTTCCACCTGTGCCGCTGGGGCTACTCCTCCACCGCTATCACCCGCCAGGTGGTGGAGAACATGACCAGGGCCCACTTCCCCCTGGA |
| | CGTCCAATGGAACGACCTGGACTACATGGACTCCCGGAGGGACTTCACGTTCAACAAGGATGGCTTCCGGGACTTCCCGGCCATGGTGCAGGAGCTGCACCAGGGCGGCCGGCGCTACATGATGATCGTGGATCCTGCCATCAGC |
| | AGCTCGGGCCCTGCCGGGAGCTACAGGCCCTACGACGAGGGTCTGCGGAGGGGGGTTTTCATCACCAACGAGACCGGCCAGCCGCTGATTGGGAAGGTATGGCCCGGGTCCACTGCCTTCCCCGACTTCACCAACCCCACAGCCC |
| | TGGCCTGGTGGGAGGACATGGTGGCTGAGTTCCATGACCAGGTGCCCTTCGACGGCATGTGGATTGACATGAACGAGCCTTCCAACTTCATCAGAGGCTCTGAGGACGGCTGCCCCAACAATGAGCTGGAGAACCCACCCTACGT |
| | GCCTGGGGTGGTTGGGGGGACCCTCCAGGCGGCCACCATCTGTGCCTCCAGCCACCAGTTTCTCTCCACACACTACAACCTGCACAACCTCTACGGCCTGACCGAAGCCATCGCCTCCCACAGGGCGCTGGTGAAGGCTCGGGGG |
| | ACACGCCCATTTGTGATCTCCCGCTCGACCTTTGCTGGCCACGGCCGATACGCCGGCCACTGGACGGGGGACGTGTGGAGCTCCTGGGAGCAGCTCGCCTCCTCCGTGCCAGAAATCCTGCAGTTTAACCTGCTGGGGGTGCCTC |
| | TGGTCGGGGCCGACGTCTGCGGCTTCCTGGGCAACACCTCAGAGGAGCTGTGTGTGCGCTGGACCCAGCTGGGGGCCTTCTACCCCTTCATGCGGAACCACAACAGCCTGCTCAGTCTGCCCCAGGAGCCGTACAGCTTCAGCGA |
| | GCCGGCCCAGCAGGCCATGAGGAAGGCCCTCACCCTGCGCTACGCACTCCTCCCCCACCTCTACACACTGTTCCACCAGGCCCACGTCGCGGGGGAGACCGTGGCCCGGCCCCTCTTCCTGGAGTTCCCCAAGGACTCTAGCACC |
| | TGGACTGTGGACCACCAGCTCCTGTGGGGGGAGGCCCTGCTCATCACCCCAGTGCTCCAGGCCGGGAAGGCCGAAGTGACTGGCTACTTCCCCTTGGGCACATGGTACGACCTGCAGACGGTGCCAATAGAGGCCCTTGGCAGCC |
| | TCCCACCCCCACCTGCAGCTCCCCGTGAGCCAGCCATCCACAGCGAGGGGCAGTGGGTGACGCTGCCGGCCCCCCTGGACACCATCAACGTCCACCTCCGGGCTGGGTACATCATCCCCCTGCAGGGCCCTGGCCTCACAACCAC |
| | AGAGTCCCGCCAGCAGCCCATGGCCCTGGCTGTGGCCCTGACCAAGGGTGGAGAGGCCCGAGGGGAGCTGTTCTGGGACGATGGAGAGAGCCTGGAAGTGCTGGAGCGAGGGGCCTACACACAGGTCATCTTCCTGGCCAGGAAT |
| | AACACGATCGTGAATGAGCTGGTACGTGTGACCAGTGAGGGAGCTGGCCTGCAGCTGCAGAAGGTGACTGTCCTGGGCGTGGCCACGGCGCCCCAGCAGGTCCTCTCCAACGGTGTCCCTGTCTCCAACTTCACCTACAGCCCCG |
| | ACACCAAGGTCCTGGACATCTGTGTCTCGCTGTTGATGGGAGAGCAGTTTCTCGTCAGCTGGTGTTAGCCGGGCGGAGTGTGTTAGTCTCTCCAGAGGGAGGCTGGTTCCCCAGGGAAGCAGAGCCTGTGTGCGGGCAGCAGCTG |
| | TGTGCGGGCCTGGGGGTTGTTAAGTGCAATTATTTTTAATAAAAGGGGCATTTGGAAAAAAAAAAAAAAGGTAGCAGTCGACAGATGAATTCTGCAGATCTGTGGCTTCTAGCTGCCCGGGTGGCATCCCTGTGACCCCTCCCCA |
| | GTGCCTCTCCTGGCCCTGGAAGTTGCCACTCCAGTGCCCACCAGCCTTGTCCTAATAAAATTAAGTTGCATCATTTTGTCTGACTAGGTGTCCTTCTATAATATTATGGGGTGGAGGGGGGTGGTATGGAGCAAGGGGCAAGTTG |
| | GGAAGACAACCTGAGTTGTTGGGATTCCAGGCATCGAGTAGATAAGTAGCATGGCGGGTTAATCATTAACTACAAGGAACCCCTAGTGATGGAGTTGGCCACTCCCTCTCTGCGCGCTCGCTCGCTCACTGAGGCCGGGCGACCA |
| | AAGGTCGCCCGACGCCCGGGCTTTGCCCGGGCGGCCTCAGTGAGCGAGCGAGCGCGCAGAGAGGGACAGATCCGAAGCCGGGCAAATCAGCGCCTGGCAGCAGTGGCGTCTGGCGGAAAACCTCAGTGTGACGCTCCCCGCCGCG |
| | TCCCACGCTTGTTCCCGGATCTGACCACCAGCGAAATCCGATTTTTGCACCGAGCTGGGTAATAAGCGTTGGCAATTTAACCGCCAGTCAGGCTTTCTTTCACAGTGTGGATTGGCGATAAAAAACAACTGCTGACGCCGCTGCG |
| | CGATCAGTTCACCCGTTCACCGCTGGATAACGACTTGGCGTAAGTGAAGCGACCCGTAAGACCCTAACGCCTGGGTCGAACGCTGGAAGGCGGCGGGCCAAACCAGGCCGAAGCAGCGTTGTTGCAGTTCACGGCAGATACACTT |
| | GCTGTTGCGGTGCTGATTACGACCGCTCACTCGTGGCAGCAACAGGGGAAAACCTTATTTATCAGCCGGAAAACCTACCGGATTGTTGGTAGTGGTCAATAGGCGATTACCGTTGTGTTGAAGTGGCGAGCGATACACCGCTTCC |
| | GGCGCGGATTGGCCTGAACTGCCAACTGGCGCAGGTAGCAGAGCGGGTAAACTGGCTCGGATTAGGGCCGCAAGAAAACTATCCCGACCGCCTTACTGCCGCCTGTTTTGACCGCTGGGATCTGCCAAGTCAGACAGTATAGCCC |
| | GTACGTCTTCCCGAGCGAAAACGGTCTGCGCTGCGGGACGCGCGAATTGAATTTGGCCCACACCAGTGGCGCGGCGACTTCCAGTTCAATATCAGCCGCTACAGTGAACAGCAACTGTTGGAAACCAGCCTTCGCCAACTGCTGC |
| | ACGCGGAAGAAGGCACTGGCTGAATATCGACGGTTTCCAGTTGGGGATTGGTGGCGACGACTCCTGGAGCCCGTCAGTATCGGCGGACTTCCAACTGAGCGCCGGTCGCTACCTTACCAGTTGGTCTGGTGTCAAAAAGCGTCCG |
| | CTTGAGTCTAGCGATCGCGCGCAGATCTGTCATGTGAGCAAAAGGCCAGCAAAAGGCCAGGAACCGTAAAAAGGCCGCGTTGCTGGCGTTTTTCCATAGGCTCCGCCCCCCTGACGAGCATCACAAAAATCGACGCTCAAGTCAG |
| | AGGTGGCGAAACCCGACAGGACTATAAAGATACCAGGCGTTTCCCCCTGGAAGCTCCCTCGTGCGCTCTCCTGTTCCGACCCTGCCGCTTACCGGATACCTGTCCGCCTTTCTCCCTTCGGGAAGCGTGGCGCTTTCTCATAGCT |
| | CACGCTGTAGGTATCTCAGTTCGGTGTAGGTCGTTCGCTCCAAGCTGGGCTGTGTGCACGAACCCCCCGTTCAGCCCGACCGCTGCGCCTTATCCGGTAACTATCGTCTTGAGTCCAACCCGGTAAGACACGACTTATCGCCACT |
| | GGCAGCAGCCACTGGTAACAGGATTAGCAGAGCGAGGTATGTAGGCGGTGCTACAGAGTTCTTGAAGTGGTGGCCTAACTACGGCTACACTAGAAGAACAGTATTTGGTATCTGCGCTCTGCTGAAGCCAGTTACCTTCGGAAAA |
| | AGAGTTGGTAGCTCTTGATCCGGCAAACAAACCACCGCTGGTAGCGGTGGTTTTTTTGTTTGCAAGCAGCAGATTACGCGCAGAAAAAAAGGATCTCAAGAAGATCCTTTGATCTTTTCTACGGGGTCTGACGCTCAGTGGAACG |
| | AAAACTCACGTTAAGGGATTTTGGTCATGAGATTATCAAAAAGGATCTTCACCTAGATCCTTTTCACGTAGAAAGCCAGTCCGCAGAAACGGTGCTGACCCCGGATGAATGTCAGCTACTGGGCTATCTGGACAAGGGAAAACGC |
| | AAGCGCAAAGAGAAAGCAGGTAGCTTGCAGTGGGCTTACATGGCGATAGCTAGACTGGGCGGTTTTATGGACAGCAAGCGAACCGGAATTGCCAGCTGGGGCGCCCTCTGGTAAGGTTGGGAAGCCCTGCAAAGTAAACTGGATG |
| | GCTTTCTTGCCGCCAAGGATCTGATGGCGCAGGGGATCAAGATCTGATCAAGAGACAGGATGAGGATCGTTTCGCATGATTGAACAAGATGGATTGCACGCAGGTTCTCCGGCCGCTTGGGTGGAGAGGCTATTCGGCTATGACT |
| | GGGCACAACAGACAATCGGCTGCTCTGATGCCGCCGTGTTCCGGCTGTCAGCGCAGGGGCGCCCGGTTCTTTTTGTCAAGACCGACCTGTCCGGTGCCCTGAATGAACTGCAAGACGAGGCAGCGCGGCTATCGTGGCTGGCCAC |
| | GACGGGCGTTCCTTGCGCAGCTGTGCTCGACGTTGTCACTGAAGCGGGAAGGGACTGGCTGCTATTGGGCGAAGTGCCGGGGCAGGATCTCCTGTCATCTCACCTTGCTCCTGCCGAGAAAGTATCCATCATGGCTGATGCAATG |
| | CGGCGGCTGCATACGCTTGATCCGGCTACCTGCCCATTCGACCACCAAGCGAAACATCGCATCGAGCGAGCACGTACTCGGATGGAAGCCGGTCTTGTCGATCAGGATGATCTGGACGAAGAGCATCAGGGGCTCGCGCCAGCCG |
| | AACTGTTCGCCAGGCTCAAGGCGAGCATGCCCGACGGCGAGGATCTCGTCGTGACCCATGGCGATGCCTGCTTGCCGAATATCATGGTGGAAAATGGCCGCTTTTCTGGATTCATCGACTGTGGCCGGCTGGGTGTGGCGGACCG |
| | CTATCAGGACATAGCGTTGGCTACCCGTGATATTGCTGAAGAGCTTGGCGGCGAATGGGCTGACCGCTTCCTCGTGCTTTACGGTATCGCCGCTCCCGATTCGCAGCGCATCGCCTTCTATCGCCTTCTTGACGAGTTCTTCTGA |
| | ATTTAAAGCCCAATACGCAAACCGCCTCTCCCCGCGCGTTGGCCGAAGCGGTTCAATATTTTGTTAAAATTCGCGTTAAATTTTTGTTAAATCAGCTATTTTTTAACCAATAGGCCGAAATCGGCAAAATCCCTTGTAAATCAAA |
| | AGAATAGACCGAGATAGGGTTGAGTGTTGTTCCAGTTTGGAACAAGAGTCCACTATTAAAGAACGTGGACTCCAACGTCAAAGGGCGAAAAACCGTCTATCAGGGCGTTGGCCCACTACGTGAACCTTCACCCTAATCAAGTTTT |
| | TTGGGGTCGAGGTGCCGTAAAGCACTAAATCGGAACCCTAAAGGGAGCCCCCGATTTAGAGCTTGACGGGGAAACCGGCGAACGTGGCGAGAAAGGAAGGGAAGAAAGCGAAAGGAGCGGGCGCTAGGGCGCTGGCAAGTGTAGC |
| | GGTCACGCTGCGCGTAACCACCACACCCGCCGCGCTAAGCGCCGCTACAGGGCGCGTCCCTTCGCCTTCAGGCTGCGTCGAGTACTGTACTGTGAGCCAGAGTTGCCCGGCGCTCTCCGGCTGCGGTAGTTCAGGCAGTTCAATC |
| | AACTGTTTACCTTGTGGAGCGACTCCAGAGGCACTTCACCGCTTGCCAGCGGCTTACGATCCAGCGCCACGATCCAGTGCAGGAGATCGTTATCGCTATACGGAACAGGTATTCGCTGGTCACTTCGATAAGGTTTGCCCGGATA |
| | AACGGAACTGGAAAAACTGCTGCTGGTGTTTTGCTTCCGTCAGTGCTGGATCGGCGTGCGGTCGGCAAAGACCAGACCGTTCTAACAGAACTGGCGATTGTTCGGCGTATCGCCAAAATCACCGCCGTAAGCCGACCACGGGTTG |
| | CCGTTTTCAGCAGGATTTAATCAGCGACTGATCCACCCAGTCCCAGACGAAGCCGCCCTGTAAACGGGGATACTGACGAAACGCCTGCCAGTATTTAGCGAAACCGCCAAGACTGTTACCCAAGCGTGGGCGTATTCGCAAAGGA |
| | TCAGCGGGCGCGTCTCTCCAGGTAGCGAAAGCCTTTTTTGATCGACCTTTCGGCACAGCCGGGAAGGGCTGGTCTTCAACCACGCGCGCGTACAACGGGCAAATAATATCGGTGGCCGTGGTGTCGGCTCCGCCGCCTTCAACTG |
| | CACCGGGCGGGAAGGATCGACAGATTTGATCCAGCGATACAGCGCGTCGTGATTAGCGCCGTGGCCTGATTCAATTCCCCAGCGACCAGTAGATCACACTCGGGTGATTACGATTGCGCTGCACCAGTCGCGTTACGGTTCGCTC |
| | TTCGCCGGTAGCCAGCGCGGATCACGGTCAGACGATTCGTTGGCACGATCCGTGGGTTTCAATACTGGCTTCAAACCACCACTAACAGGCCGTAGCGGTCGCACAGCGTGTACCACAGCGGTTGGTTCGGATAATCGAACAGCGC |
| | ACGGCGTTAAAGTTGTTCTGCTTCAACAGCAGGATATTCTGCACCTTCGTCTGCTCTTCCTAACCTGACCAAGCAGAGGATCTGCTCGTGACGGTTAATCCTCGAATCAGCAACGGCTTGCCGTTCAGCAGCAGCAGACCAAGTT |
| | CAATCCGCACCTCGCGGAAACCGACAACGCAGGCTTCTGCTTCAATCAGCGTGCCGTCGGCGGTGTGCAGTTCAACCACCGCACGATAGAGATTCGGGATTTCGGCGCTCCACAGTTTCGGGTTTTCGACGTTCAGACGTAGTGT |
| | GACGCGATCTGCAAACCACCACGCTCAACGATAATTTCACCGCCGAAAGGCGCGGTGCCGCTGGCGACCTGCGTTTCACCCTGCCAGAAAGAAACTGTTACCCGTAGGTAGTCACGCAACTCGCCGCACACTGAACTTCAGCCTC |
| | CAGTACAGCGCGGCTGAAATCGTCTTAAAGCGAGTGGCAACTGGAAATCGCTGATTTGTGTAGTCGGTTTAGCAGCAACGAGACTTCACGGAAAATCCGCTAATCCGCCACAGATCCTGATCTTCCAGATAACTGCCGTCACTCC |
| | AACGCAGCACCTTCACCGCGAGGCGGTTTTCTCCGGCGCGTAAAAATCGCTCAGGTCAAATTCAGACGGCAAACGACTGTCCTGGCCGTAACCGACCCAGCGCCCGTTGCACCACAGATTGAAACGCCGAGTTTACGCCTCAAAA |
| | ATAATTCGCGTCTGGCCTTCCTGTAGCCAGCTTTCACAACTATAATAGTGAGCGAGTAACAACCCGTCGGATTCTCCGTGGGAACAAACGGCGGATTGACCGTATAGGGATAGGTTACGTTGGTGTAGTAGGGCGCTCCGTAACC |
| | GTGCTACTGCCAGTTTGAGGGGACGACGACAGTATCGGCCTCAGGAAGATCGCACTCCAGCCAGCTTTCCGGCACCGCTTCTGGTACTGGAAACCAGGCAAAGCGCCTATCGCCTATCAGGCTGCACAACTGTTGGGAAGGGCGA |
| | TCTGTGCGGGCCTCTTCGCTATTACGCCAGCTTGCGAAAGGGGGTAGTGCTGCAAGGCGATTAAGTTGGGTAACGCCAGGGTTTTCCCAGTCACGACGTGGATCTGGGCCACTCCCTCT |
| 464 | >pP113 |
| | CTGCGCGCTCGCTCGCTCACTGAGGCCGCCCGGGCAAAGCCCGGGCGTCGGGCGACCTTTGGTCGCCCGGCCTCAGTGAGCGAGCGAGCGCGCAGAGAGGGAGTGGCCAACTCCATCACTAGGGGTTCCTGGAGGGGTGGAGTCG |
| | TGACGTGAATTACGTCATAGGGTTAGGGAGGTCGGCCGCTCTAGGAGTTAATTTTTAAAAAGCAGTCAAAAGTCCAAGTGCCCTTGCGAGCATTTACTCTCTCTGTTTGCTCTGGTTAATAATCTCAGGAGCACAAACATTCCTT |
| | ACTAGTTCTAGGAGTTAATTTTTAAAAAGCAGTCAAAAGTCCAAGTGCCCTTGCGAGCATTTACTCTCTCTGTTTGCTCTGGTTAATAATCTCAGGAGCACAAACATTCCTTACTAGTTCTAGAGCGGCCGCCAGTGTGCTGGAA |
| | TTCGGCTTTTTTAGGGCTGGAAGCTACCTTTGACATCATTTCCTCTGCGAATGCATGTATAATTTCTACAGAACCTATTAGAAAGGATCACCCAGCCTCTGCTTTTGTACAACTTTCCCTTAAAAAACTGCCAATCCCACTGCTG |
| | TTTGGCCCAATAGTGAGAACTTTTTCCTGCTGCCTCTTGGTGCTTTTGCCTATGGCCCCTATTCTGCCTGCTGAAGACACTCTTGCCAGCATGGACTTAAACCCCTCCAGCTCTGACAATCCTCTTTCTCTTTTGTTTTACATGA |
| | AGGGTCTGGCAGCCAAAGCAATCACTCAAAGTTCAAACCTTATCATTTTTTGCTTTGTTCCTCTTGGCCTTGGTTTTGTACATCAGCTTTGAAAATACCATCCCAGGGTTAATGCTGGGGTTAATTTATAACTGAGAGTGCTCTA |
| | GTTCTGCAATACAGGACATGCTATAAAAATGGAAAGATGTTGCTTTCTGAGAGATCAGCTTACATGTGGTACCGAGCTCGGATCCACTAGTAACGGCCGCCAGTGTGCTGGAATTCGGCTTTCCAGGCCATCTCCAACCATGGGA |
| | GTGAGGCACCCGCCCTGCTCCCACCGGCTCCTGGCCGTCTGCGCCCTCGTGTCCTTGGCAACCGCTGCACTCCTGGAGTTTGGGCTGAGCTGGGTCTTTCTGGTGGCCCTGCTGAAGGGAGTCCAGTGTGAGCAGCAGGGAGCCA |
| | GCAGACCAGGGCCCCGGGATGCCCAGGCACACCCCGGCCGTCCCAGAGCAGTGCCCACACAGTGCGACGTCCCCCCCAACAGCCGCTTCGATTGCGCCCCTGACAAGGCCATCACCCAGGAACAGTGCGAGGCCCGCGGCTGCTG |
| | CTACATCCCTGCAAAGCAGGGGCTGCAGGGAGCCCAGATGGGGCAGCCCTGGTGCTTCTTCCCACCCAGCTACCCCAGCTACAAGCTGGAGAACCTGAGCTCCTCTGAAATGGGCTACACGGCCACCCTGACCCGTACCACCCCC |
| | ACCTTCTTCCCCAAGGACATCCTGACCCTGCGGCTGGACGTGATGATGGAGACTGAGAACCGCCTCCACTTCACGATCAAAGATCCAGCTAACAGGCGCTACGAGGTGCCCTTGGAGACCCCGCGTGTCCACAGCCGGGCACCGT |
| | CCCCACTCTACAGCGTGGAGTTCTCCGAGGAGCCCTTCGGGGTGATCGTGCACCGGCAGCTGGACGGCCGCGTGCTGCTGAACACGACGGTGGCGCCCCTGTTCTTTGCGGACCAGTTCCTTCAGCTGTCCACCTCGCTGCCCTC |
| | GCAGTATATCACAGGCCTCGCCGAGCACCTCAGTCCCCTGATGCTCAGCACCAGCTGGACCAGGATCACCCTGTGGAACCGGGACCTTGCGCCCACGCCCGGTGCGAACCTCTACGGGTCTCACCCTTTCTACCTGGCGCTGGAG |
| | GACGGCGGGTCGGCACACGGGGTGTTCCTGCTAAACAGCAATGCCATGGATGTGGTCCTGCAGCCGAGCCCTGCCCTTAGCTGGAGGTCGACAGGTGGGATCCTGGATGTCTACATCTTCCTGGGCCCAGAGCCCAAGAGCGTGG |
| | TGCAGCAGTACCTGGACGTTGTGGGATACCCGTTCATGCCGCCATACTGGGGCCTGGGCTTCCACCTGTGCCGCTGGGGCTACTCCTCCACCGCTATCACCCGCCAGGTGGTGGAGAACATGACCAGGGCCCACTTCCCCCTGGA |
| | CGTCCAATGGAACGACCTGGACTACATGGACTCCCGGAGGGACTTCACGTTCAACAAGGATGGCTTCCGGGACTTCCCGGCCATGGTGCAGGAGCTGCACCAGGGCGGCCGGCGCTACATGATGATCGTGGATCCTGCCATCAGC |
| | AGCTCGGGCCCTGCCGGGAGCTACAGGCCCTACGACGAGGGTCTGCGGAGGGGGGTTTTCATCACCAACGAGACCGGCCAGCCGCTGATTGGGAAGGTATGGCCCGGGTCCACTGCCTTCCCCGACTTCACCAACCCCACAGCCC |
| | TGGCCTGGTGGGAGGACATGGTGGCTGAGTTCCATGACCAGGTGCCCTTCGACGGCATGTGGATTGACATGAACGAGCCTTCCAACTTCATCAGAGGCTCTGAGGACGGCTGCCCCAACAATGAGCTGGAGAACCCACCCTACGT |
| | GCCTGGGGTGGTTGGGGGGACCCTCCAGGCGGCCACCATCTGTGCCTCCAGCCACCAGTTTCTCTCCACACACTACAACCTGCACAACCTCTACGGCCTGACCGAAGCCATCGCCTCCCACAGGGCGCTGGTGAAGGCTCGGGGG |
| | ACACGCCCATTTGTGATCTCCCGCTCGACCTTTGCTGGCCACGGCCGATACGCCGGCCACTGGACGGGGGACGTGTGGAGCTCCTGGGAGCAGCTCGCCTCCTCCGTGCCAGAAATCCTGCAGTTTAACCTGCTGGGGGTGCCTC |
| | TGGTCGGGGCCGACGTCTGCGGCTTCCTGGGCAACACCTCAGAGGAGCTGTGTGTGCGCTGGACCCAGCTGGGGGCCTTCTACCCCTTCATGCGGAACCACAACAGCCTGCTCAGTCTGCCCCAGGAGCCGTACAGCTTCAGCGA |
| | GCCGGCCCAGCAGGCCATGAGGAAGGCCCTCACCCTGCGCTACGCACTCCTCCCCCACCTCTACACACTGTTCCACCAGGCCCACGTCGCGGGGGAGACCGTGGCCCGGCCCCTCTTCCTGGAGTTCCCCAAGGACTCTAGCACC |
| | TGGACTGTGGACCACCAGCTCCTGTGGGGGGAGGCCCTGCTCATCACCCCAGTGCTCCAGGCCGGGAAGGCCGAAGTGACTGGCTACTTCCCCTTGGGCACATGGTACGACCTGCAGACGGTGCCAATAGAGGCCCTTGGCAGCC |
| | TCCCACCCCCACCTGCAGCTCCCCGTGAGCCAGCCATCCACAGCGAGGGGCAGTGGGTGACGCTGCCGGCCCCCCTGGACACCATCAACGTCCACCTCCGGGCTGGGTACATCATCCCCCTGCAGGGCCCTGGCCTCACAACCAC |
| | AGAGTCCCGCCAGCAGCCCATGGCCCTGGCTGTGGCCCTGACCAAGGGTGGAGAGGCCCGAGGGGAGCTGTTCTGGGACGATGGAGAGAGCCTGGAAGTGCTGGAGCGAGGGGCCTACACACAGGTCATCTTCCTGGCCAGGAAT |
| | AACACGATCGTGAATGAGCTGGTACGTGTGACCAGTGAGGGAGCTGGCCTGCAGCTGCAGAAGGTGACTGTCCTGGGCGTGGCCACGGCGCCCCAGCAGGTCCTCTCCAACGGTGTCCCTGTCTCCAACTTCACCTACAGCCCCG |
| | ACACCAAGGTCCTGGACATCTGTGTCTCGCTGTTGATGGGAGAGCAGTTTCTCGTCAGCTGGTGTTAGCCGGGCGGAGTGTGTTAGTCTCTCCAGAGGGAGGCTGGTTCCCCAGGGAAGCAGAGCCTGTGTGCGGGCAGCAGCTG |
| | TGTGCGGGCCTGGGGGTTGTTAAGTGCAATTATTTTTAATAAAAGGGGCATTTGGAAAAAAAAAAAAAAGGTAGCAGTCGACAGATGAATTCTGCAGATCTGTGGCTTCTAGCTGCCCGGGTGGCATCCCTGTGACCCCTCCCCA |
| | GTGCCTCTCCTGGCCCTGGAAGTTGCCACTCCAGTGCCCACCAGCCTTGTCCTAATAAAATTAAGTTGCATCATTTTGTCTGACTAGGTGTCCTTCTATAATATTATGGGGTGGAGGGGGGTGGTATGGAGCAAGGGGCAAGTTG |
| | GGAAGACAACCTGAGTTGTTGGGATTCCAGGCATCGAGTAGATAAGTAGCATGGCGGGTTAATCATTAACTACAAGGAACCCCTAGTGATGGAGTTGGCCACTCCCTCTCTGCGCGCTCGCTCGCTCACTGAGGCCGGGCGACCA |
| | AAGGTCGCCCGACGCCCGGGCTTTGCCCGGGCGGCCTCAGTGAGCGAGCGAGCGCGCAGAGAGGGACAGATCCGAAGCCGGGCAAATCAGCGCCTGGCAGCAGTGGCGTCTGGCGGAAAACCTCAGTGTGACGCTCCCCGCCGCG |
| | TCCCACGCTTGTTCCCGGATCTGACCACCAGCGAAATCCGATTTTTGCACCGAGCTGGGTAATAAGCGTTGGCAATTTAACCGCCAGTCAGGCTTTCTTTCACAGTGTGGATTGGCGATAAAAAACAACTGCTGACGCCGCTGCG |
| | CGATCAGTTCACCCGTTCACCGCTGGATAACGACTTGGCGTAAGTGAAGCGACCCGTAAGACCCTAACGCCTGGGTCGAACGCTGGAAGGCGGCGGGCCAAACCAGGCCGAAGCAGCGTTGTTGCAGTTCACGGCAGATACACTT |
| | GCTGTTGCGGTGCTGATTACGACCGCTCACTCGTGGCAGCAACAGGGGAAAACCTTATTTATCAGCCGGAAAACCTACCGGATTGTTGGTAGTGGTCAATAGGCGATTACCGTTGTGTTGAAGTGGCGAGCGATACACCGCTTCC |
| | GGCGCGGATTGGCCTGAACTGCCAACTGGCGCAGGTAGCAGAGCGGGTAAACTGGCTCGGATTAGGGCCGCAAGAAAACTATCCCGACCGCCTTACTGCCGCCTGTTTTGACCGCTGGGATCTGCCAAGTCAGACAGTATAGCCC |
| | GTACGTCTTCCCGAGCGAAAACGGTCTGCGCTGCGGGACGCGCGAATTGAATTTGGCCCACACCAGTGGCGCGGCGACTTCCAGTTCAATATCAGCCGCTACAGTGAACAGCAACTGTTGGAAACCAGCCTTCGCCAACTGCTGC |
| | ACGCGGAAGAAGGCACTGGCTGAATATCGACGGTTTCCAGTTGGGGATTGGTGGCGACGACTCCTGGAGCCCGTCAGTATCGGCGGACTTCCAACTGAGCGCCGGTCGCTACCTTACCAGTTGGTCTGGTGTCAAAAAGCGTCCG |
| | CTTGAGTCTAGCGATCGCGCGCAGATCTGTCATGTGAGCAAAAGGCCAGCAAAAGGCCAGGAACCGTAAAAAGGCCGCGTTGCTGGCGTTTTTCCATAGGCTCCGCCCCCCTGACGAGCATCACAAAAATCGACGCTCAAGTCAG |
| | AGGTGGCGAAACCCGACAGGACTATAAAGATACCAGGCGTTTCCCCCTGGAAGCTCCCTCGTGCGCTCTCCTGTTCCGACCCTGCCGCTTACCGGATACCTGTCCGCCTTTCTCCCTTCGGGAAGCGTGGCGCTTTCTCATAGCT |
| | CACGCTGTAGGTATCTCAGTTCGGTGTAGGTCGTTCGCTCCAAGCTGGGCTGTGTGCACGAACCCCCCGTTCAGCCCGACCGCTGCGCCTTATCCGGTAACTATCGTCTTGAGTCCAACCCGGTAAGACACGACTTATCGCCACT |
| | GGCAGCAGCCACTGGTAACAGGATTAGCAGAGCGAGGTATGTAGGCGGTGCTACAGAGTTCTTGAAGTGGTGGCCTAACTACGGCTACACTAGAAGAACAGTATTTGGTATCTGCGCTCTGCTGAAGCCAGTTACCTTCGGAAAA |
| | AGAGTTGGTAGCTCTTGATCCGGCAAACAAACCACCGCTGGTAGCGGTGGTTTTTTTGTTTGCAAGCAGCAGATTACGCGCAGAAAAAAAGGATCTCAAGAAGATCCTTTGATCTTTTCTACGGGGTCTGACGCTCAGTGGAACG |
| | AAAACTCACGTTAAGGGATTTTGGTCATGAGATTATCAAAAAGGATCTTCACCTAGATCCTTTTCACGTAGAAAGCCAGTCCGCAGAAACGGTGCTGACCCCGGATGAATGTCAGCTACTGGGCTATCTGGACAAGGGAAAACGC |
| | AAGCGCAAAGAGAAAGCAGGTAGCTTGCAGTGGGCTTACATGGCGATAGCTAGACTGGGCGGTTTTATGGACAGCAAGCGAACCGGAATTGCCAGCTGGGGCGCCCTCTGGTAAGGTTGGGAAGCCCTGCAAAGTAAACTGGATG |
| | GCTTTCTTGCCGCCAAGGATCTGATGGCGCAGGGGATCAAGATCTGATCAAGAGACAGGATGAGGATCGTTTCGCATGATTGAACAAGATGGATTGCACGCAGGTTCTCCGGCCGCTTGGGTGGAGAGGCTATTCGGCTATGACT |
| | GGGCACAACAGACAATCGGCTGCTCTGATGCCGCCGTGTTCCGGCTGTCAGCGCAGGGGCGCCCGGTTCTTTTTGTCAAGACCGACCTGTCCGGTGCCCTGAATGAACTGCAAGACGAGGCAGCGCGGCTATCGTGGCTGGCCAC |
| | GACGGGCGTTCCTTGCGCAGCTGTGCTCGACGTTGTCACTGAAGCGGGAAGGGACTGGCTGCTATTGGGCGAAGTGCCGGGGCAGGATCTCCTGTCATCTCACCTTGCTCCTGCCGAGAAAGTATCCATCATGGCTGATGCAATG |
| | CGGCGGCTGCATACGCTTGATCCGGCTACCTGCCCATTCGACCACCAAGCGAAACATCGCATCGAGCGAGCACGTACTCGGATGGAAGCCGGTCTTGTCGATCAGGATGATCTGGACGAAGAGCATCAGGGGCTCGCGCCAGCCG |
| | AACTGTTCGCCAGGCTCAAGGCGAGCATGCCCGACGGCGAGGATCTCGTCGTGACCCATGGCGATGCCTGCTTGCCGAATATCATGGTGGAAAATGGCCGCTTTTCTGGATTCATCGACTGTGGCCGGCTGGGTGTGGCGGACCG |
| | CTATCAGGACATAGCGTTGGCTACCCGTGATATTGCTGAAGAGCTTGGCGGCGAATGGGCTGACCGCTTCCTCGTGCTTTACGGTATCGCCGCTCCCGATTCGCAGCGCATCGCCTTCTATCGCCTTCTTGACGAGTTCTTCTGA |
| | ATTTAAAGCCCAATACGCAAACCGCCTCTCCCCGCGCGTTGGCCGAAGCGGTTCAATATTTTGTTAAAATTCGCGTTAAATTTTTGTTAAATCAGCTATTTTTTAACCAATAGGCCGAAATCGGCAAAATCCCTTGTAAATCAAA |
| | AGAATAGACCGAGATAGGGTTGAGTGTTGTTCCAGTTTGGAACAAGAGTCCACTATTAAAGAACGTGGACTCCAACGTCAAAGGGCGAAAAACCGTCTATCAGGGCGTTGGCCCACTACGTGAACCTTCACCCTAATCAAGTTTT |
| | TTGGGGTCGAGGTGCCGTAAAGCACTAAATCGGAACCCTAAAGGGAGCCCCCGATTTAGAGCTTGACGGGGAAACCGGCGAACGTGGCGAGAAAGGAAGGGAAGAAAGCGAAAGGAGCGGGCGCTAGGGCGCTGGCAAGTGTAGC |
| | GGTCACGCTGCGCGTAACCACCACACCCGCCGCGCTAAGCGCCGCTACAGGGCGCGTCCCTTCGCCTTCAGGCTGCGTCGAGTACTGTACTGTGAGCCAGAGTTGCCCGGCGCTCTCCGGCTGCGGTAGTTCAGGCAGTTCAATC |
| | AACTGTTTACCTTGTGGAGCGACTCCAGAGGCACTTCACCGCTTGCCAGCGGCTTACGATCCAGCGCCACGATCCAGTGCAGGAGATCGTTATCGCTATACGGAACAGGTATTCGCTGGTCACTTCGATAAGGTTTGCCCGGATA |
| | AACGGAACTGGAAAAACTGCTGCTGGTGTTTTGCTTCCGTCAGTGCTGGATCGGCGTGCGGTCGGCAAAGACCAGACCGTTCTAACAGAACTGGCGATTGTTCGGCGTATCGCCAAAATCACCGCCGTAAGCCGACCACGGGTTG |
| | CCGTTTTCAGCAGGATTTAATCAGCGACTGATCCACCCAGTCCCAGACGAAGCCGCCCTGTAAACGGGGATACTGACGAAACGCCTGCCAGTATTTAGCGAAACCGCCAAGACTGTTACCCAAGCGTGGGCGTATTCGCAAAGGA |
| | TCAGCGGGCGCGTCTCTCCAGGTAGCGAAAGCCTTTTTTGATCGACCTTTCGGCACAGCCGGGAAGGGCTGGTCTTCAACCACGCGCGCGTACAACGGGCAAATAATATCGGTGGCCGTGGTGTCGGCTCCGCCGCCTTCAACTG |
| | CACCGGGCGGGAAGGATCGACAGATTTGATCCAGCGATACAGCGCGTCGTGATTAGCGCCGTGGCCTGATTCAATTCCCCAGCGACCAGTAGATCACACTCGGGTGATTACGATTGCGCTGCACCAGTCGCGTTACGGTTCGCTC |
| | TTCGCCGGTAGCCAGCGCGGATCACGGTCAGACGATTCGTTGGCACGATCCGTGGGTTTCAATACTGGCTTCAAACCACCACTAACAGGCCGTAGCGGTCGCACAGCGTGTACCACAGCGGTTGGTTCGGATAATCGAACAGCGC |
| | ACGGCGTTAAAGTTGTTCTGCTTCAACAGCAGGATATTCTGCACCTTCGTCTGCTCTTCCTAACCTGACCAAGCAGAGGATCTGCTCGTGACGGTTAATCCTCGAATCAGCAACGGCTTGCCGTTCAGCAGCAGCAGACCAAGTT |
| | CAATCCGCACCTCGCGGAAACCGACAACGCAGGCTTCTGCTTCAATCAGCGTGCCGTCGGCGGTGTGCAGTTCAACCACCGCACGATAGAGATTCGGGATTTCGGCGCTCCACAGTTTCGGGTTTTCGACGTTCAGACGTAGTGT |
| | GACGCGATCTGCAAACCACCACGCTCAACGATAATTTCACCGCCGAAAGGCGCGGTGCCGCTGGCGACCTGCGTTTCACCCTGCCAGAAAGAAACTGTTACCCGTAGGTAGTCACGCAACTCGCCGCACACTGAACTTCAGCCTC |
| | CAGTACAGCGCGGCTGAAATCGTCTTAAAGCGAGTGGCAACTGGAAATCGCTGATTTGTGTAGTCGGTTTAGCAGCAACGAGACTTCACGGAAAATCCGCTAATCCGCCACAGATCCTGATCTTCCAGATAACTGCCGTCACTCC |
| | AACGCAGCACCTTCACCGCGAGGCGGTTTTCTCCGGCGCGTAAAAATCGCTCAGGTCAAATTCAGACGGCAAACGACTGTCCTGGCCGTAACCGACCCAGCGCCCGTTGCACCACAGATTGAAACGCCGAGTTTACGCCTCAAAA |
| | ATAATTCGCGTCTGGCCTTCCTGTAGCCAGCTTTCACAACTATAATAGTGAGCGAGTAACAACCCGTCGGATTCTCCGTGGGAACAAACGGCGGATTGACCGTATAGGGATAGGTTACGTTGGTGTAGTAGGGCGCTCCGTAACC |
| | GTGCTACTGCCAGTTTGAGGGGACGACGACAGTATCGGCCTCAGGAAGATCGCACTCCAGCCAGCTTTCCGGCACCGCTTCTGGTACTGGAAACCAGGCAAAGCGCCTATCGCCTATCAGGCTGCACAACTGTTGGGAAGGGCGA |
| | TCTGTGCGGGCCTCTTCGCTATTACGCCAGCTTGCGAAAGGGGGTAGTGCTGCAAGGCGATTAAGTTGGGTAACGCCAGGGTTTTCCCAGTCACGACGTGGATCTGGGCCACTCCCTCT |
| 465 | >pP110 |
| | CTGCGCGCTCGCTCGCTCACTGAGGCCGCCCGGGCAAAGCCCGGGCGTCGGGCGACCTTTGGTCGCCCGGCCTCAGTGAGCGAGCGAGCGCGCAGAGAGGGAGTGGCCAACTCCATCACTAGGGGTTCCTGGAGGGGTGG |
| | AGTCGTGACGTGAATTACGTCATAGGGTTAGGGAGGTCGGCCGCTCTAGGAGTTAATTTTTAAAAAGCAGTCAAAAGTCCAAGTGCCCTTGCGAGCATTTACTCTCTCTGTTTGCTCTGGTTAATAATCTCAGGAGCACA |
| | AACATTCCTTACTAGTTCTAGGAGTTAATTTTTAAAAAGCAGTCAAAAGTCCAAGTGCCCTTGCGAGCATTTACTCTCTCTGTTTGCTCTGGTTAATAATCTCAGGAGCACAAACATTCCTTACTAGTTCTAGAGCGGCC |
| | GCCAGTGTGCTGGAATTCGGCTTTTTTAGGGCTGGAAGCTACCTTTGACATCATTTCCTCTGCGAATGCATGTATAATTTCTACAGAACCTATTAGAAAGGATCACCCAGCCTCTGCTTTTGTACAACTTTCCCTTAAAA |
| | AACTGCCAATCCCACTGCTGTTTGGCCCAATAGTGAGAACTTTTTCCTGCTGCCTCTTGGTGCTTTTGCCTATGGCCCCTATTCTGCCTGCTGAAGACACTCTTGCCAGCATGGACTTAAACCCCTCCAGCTCTGACAAT |
| | CCTCTTTCTCTTTTGTTTTACATGAAGGGTCTGGCAGCCAAAGCAATCACTCAAAGTTCAAACCTTATCATTTTTTGCTTTGTTCCTCTTGGCCTTGGTTTTGTACATCAGCTTTGAAAATACCATCCCAGGGTTAATGC |
| | TGGGGTTAATTTATAACTGAGAGTGCTCTAGTTCTGCAATACAGGACATGCTATAAAAATGGAAAGATGTTGCTTTCTGAGAGATCAGCTTACATGTGGTACCGAGCTCGGATCCACTAGTAACGGCCGCCAGTGTGCTG |
| | GAATTCGGCTTTCCAGGCCATCTCCAACCATGGGAGTGAGGCACCCGCCCTGCTCCCACCGGCTCCTGGCCGTCTGCGCCCTCGTGTCCTTGGCAACCGCTGCACTCCTGGGGCAGCAGGGAGCCAGCAGACCAGGGCCC |
| | CGGGATGCCCAGGCACACCCCGGCCGTCCCAGAGCAGTGCCCACACAGTGCGACGTCCCCCCCAACAGCCGCTTCGATTGCGCCCCTGACAAGGCCATCACCCAGGAACAGTGCGAGGCCCGCGGCTGCTGCTACATCCC |
| | TGCAAAGCAGGGGCTGCAGGGAGCCCAGATGGGGCAGCCCTGGTGCTTCTTCCCACCCAGCTACCCCAGCTACAAGCTGGAGAACCTGAGCTCCTCTGAAATGGGCTACACGGCCACCCTGACCCGTACCACCCCCACCT |
| | TCTTCCCCAAGGACATCCTGACCCTGCGGCTGGACGTGATGATGGAGACTGAGAACCGCCTCCACTTCACGATCAAAGATCCAGCTAACAGGCGCTACGAGGTGCCCTTGGAGACCCCGCGTGTCCACAGCCGGGCACCG |
| | TCCCCACTCTACAGCGTGGAGTTCTCCGAGGAGCCCTTCGGGGTGATCGTGCACCGGCAGCTGGACGGCCGCGTGCTGCTGAACACGACGGTGGCGCCCCTGTTCTTTGCGGACCAGTTCCTTCAGCTGTCCACCTCGCT |
| | GCCCTCGCAGTATATCACAGGCCTCGCCGAGCACCTCAGTCCCCTGATGCTCAGCACCAGCTGGACCAGGATCACCCTGTGGAACCGGGACCTTGCGCCCACGCCCGGTGCGAACCTCTACGGGTCTCACCCTTTCTACC |
| | TGGCGCTGGAGGACGGCGGGTCGGCACACGGGGTGTTCCTGCTAAACAGCAATGCCATGGATGTGGTCCTGCAGCCGAGCCCTGCCCTTAGCTGGAGGTCGACAGGTGGGATCCTGGATGTCTACATCTTCCTGGGCCCA |
| | GAGCCCAAGAGCGTGGTGCAGCAGTACCTGGACGTTGTGGGATACCCGTTCATGCCGCCATACTGGGGCCTGGGCTTCCACCTGTGCCGCTGGGGCTACTCCTCCACCGCTATCACCCGCCAGGTGGTGGAGAACATGAC |
| | CAGGGCCCACTTCCCCCTGGACGTCCAATGGAACGACCTGGACTACATGGACTCCCGGAGGGACTTCACGTTCAACAAGGATGGCTTCCGGGACTTCCCGGCCATGGTGCAGGAGCTGCACCAGGGCGGCCGGCGCTACA |
| | TGATGATCGTGGATCCTGCCATCAGCAGCTCGGGCCCTGCCGGGAGCTACAGGCCCTACGACGAGGGTCTGCGGAGGGGGGTTTTCATCACCAACGAGACCGGCCAGCCGCTGATTGGGAAGGTATGGCCCGGGTCCACT |
| | GCCTTCCCCGACTTCACCAACCCCACAGCCCTGGCCTGGTGGGAGGACATGGTGGCTGAGTTCCATGACCAGGTGCCCTTCGACGGCATGTGGATTGACATGAACGAGCCTTCCAACTTCATCAGAGGCTCTGAGGACGG |
| | CTGCCCCAACAATGAGCTGGAGAACCCACCCTACGTGCCTGGGGTGGTTGGGGGGACCCTCCAGGCGGCCACCATCTGTGCCTCCAGCCACCAGTTTCTCTCCACACACTACAACCTGCACAACCTCTACGGCCTGACCG |
| | AAGCCATCGCCTCCCACAGGGCGCTGGTGAAGGCTCGGGGGACACGCCCATTTGTGATCTCCCGCTCGACCTTTGCTGGCCACGGCCGATACGCCGGCCACTGGACGGGGGACGTGTGGAGCTCCTGGGAGCAGCTCGCC |
| | TCCTCCGTGCCAGAAATCCTGCAGTTTAACCTGCTGGGGGTGCCTCTGGTCGGGGCCGACGTCTGCGGCTTCCTGGGCAACACCTCAGAGGAGCTGTGTGTGCGCTGGACCCAGCTGGGGGCCTTCTACCCCTTCATGCG |
| | GAACCACAACAGCCTGCTCAGTCTGCCCCAGGAGCCGTACAGCTTCAGCGAGCCGGCCCAGCAGGCCATGAGGAAGGCCCTCACCCTGCGCTACGCACTCCTCCCCCACCTCTACACACTGTTCCACCAGGCCCACGTCG |
| | CGGGGGAGACCGTGGCCCGGCCCCTCTTCCTGGAGTTCCCCAAGGACTCTAGCACCTGGACTGTGGACCACCAGCTCCTGTGGGGGGAGGCCCTGCTCATCACCCCAGTGCTCCAGGCCGGGAAGGCCGAAGTGACTGGC |
| | TACTTCCCCTTGGGCACATGGTACGACCTGCAGACGGTGCCAATAGAGGCCCTTGGCAGCCTCCCACCCCCACCTGCAGCTCCCCGTGAGCCAGCCATCCACAGCGAGGGGCAGTGGGTGACGCTGCCGGCCCCCCTGGA |
| | CACCATCAACGTCCACCTCCGGGCTGGGTACATCATCCCCCTGCAGGGCCCTGGCCTCACAACCACAGAGTCCCGCCAGCAGCCCATGGCCCTGGCTGTGGCCCTGACCAAGGGTGGAGAGGCCCGAGGGGAGCTGTTCT |
| | GGGACGATGGAGAGAGCCTGGAAGTGCTGGAGCGAGGGGCCTACACACAGGTCATCTTCCTGGCCAGGAATAACACGATCGTGAATGAGCTGGTACGTGTGACCAGTGAGGGAGCTGGCCTGCAGCTGCAGAAGGTGACT |
| | GTCCTGGGCGTGGCCACGGCGCCCCAGCAGGTCCTCTCCAACGGTGTCCCTGTCTCCAACTTCACCTACAGCCCCGACACCAAGGTCCTGGACATCTGTGTCTCGCTGTTGATGGGAGAGCAGTTTCTCGTCAGCTGGTG |
| | TTAGCCGGGCGGAGTGTGTTAGTCTCTCCAGAGGGAGGCTGGTTCCCCAGGGAAGCAGAGCCTGTGTGCGGGCAGCAGCTGTGTGCGGGCCTGGGGGTTGTTAAGTGCAATTATTTTTAATAAAAGGGGCATTTGGAAAA |
| | AAAAAAAAAAGGTAGCAGTCGACAGATGAATTCTGCAGATCTGTGGCTTCTAGCTGCCCGGGTGGCATCCCTGTGACCCCTCCCCAGTGCCTCTCCTGGCCCTGGAAGTTGCCACTCCAGTGCCCACCAGCCTTGTCCTA |
| | ATAAAATTAAGTTGCATCATTTTGTCTGACTAGGTGTCCTTCTATAATATTATGGGGTGGAGGGGGGTGGTATGGAGCAAGGGGCAAGTTGGGAAGACAACCTGAGTTGTTGGGATTCCAGGCATCGAGTAGATAAGTAG |
| | CATGGCGGGTTAATCATTAACTACAAGGAACCCCTAGTGATGGAGTTGGCCACTCCCTCTCTGCGCGCTCGCTCGCTCACTGAGGCCGGGCGACCAAAGGTCGCCCGACGCCCGGGCTTTGCCCGGGCGGCCTCAGTGAG |
| | CGAGCGAGCGCGCAGAGAGGGACAGATCCGAAGCCGGGCAAATCAGCGCCTGGCAGCAGTGGCGTCTGGCGGAAAACCTCAGTGTGACGCTCCCCGCCGCGTCCCACGCTTGTTCCCGGATCTGACCACCAGCGAAATCC |
| | GATTTTTGCACCGAGCTGGGTAATAAGCGTTGGCAATTTAACCGCCAGTCAGGCTTTCTTTCACAGTGTGGATTGGCGATAAAAAACAACTGCTGACGCCGCTGCGCGATCAGTTCACCCGTTCACCGCTGGATAACGAC |
| | TTGGCGTAAGTGAAGCGACCCGTAAGACCCTAACGCCTGGGTCGAACGCTGGAAGGCGGCGGGCCAAACCAGGCCGAAGCAGCGTTGTTGCAGTTCACGGCAGATACACTTGCTGTTGCGGTGCTGATTACGACCGCTCA |
| | CTCGTGGCAGCAACAGGGGAAAACCTTATTTATCAGCCGGAAAACCTACCGGATTGTTGGTAGTGGTCAATAGGCGATTACCGTTGTGTTGAAGTGGCGAGCGATACACCGCTTCCGGCGCGGATTGGCCTGAACTGCCA |
| | ACTGGCGCAGGTAGCAGAGCGGGTAAACTGGCTCGGATTAGGGCCGCAAGAAAACTATCCCGACCGCCTTACTGCCGCCTGTTTTGACCGCTGGGATCTGCCAAGTCAGACAGTATAGCCCGTACGTCTTCCCGAGCGAA |
| | AACGGTCTGCGCTGCGGGACGCGCGAATTGAATTTGGCCCACACCAGTGGCGCGGCGACTTCCAGTTCAATATCAGCCGCTACAGTGAACAGCAACTGTTGGAAACCAGCCTTCGCCAACTGCTGCACGCGGAAGAAGGC |
| | ACTGGCTGAATATCGACGGTTTCCAGTTGGGGATTGGTGGCGACGACTCCTGGAGCCCGTCAGTATCGGCGGACTTCCAACTGAGCGCCGGTCGCTACCTTACCAGTTGGTCTGGTGTCAAAAAGCGTCCGCTTGAGTCT |
| | AGCGATCGCGCGCAGATCTGTCATGTGAGCAAAAGGCCAGCAAAAGGCCAGGAACCGTAAAAAGGCCGCGTTGCTGGCGTTTTTCCATAGGCTCCGCCCCCCTGACGAGCATCACAAAAATCGACGCTCAAGTCAGAGGT |
| | GGCGAAACCCGACAGGACTATAAAGATACCAGGCGTTTCCCCCTGGAAGCTCCCTCGTGCGCTCTCCTGTTCCGACCCTGCCGCTTACCGGATACCTGTCCGCCTTTCTCCCTTCGGGAAGCGTGGCGCTTTCTCATAGC |
| | TCACGCTGTAGGTATCTCAGTTCGGTGTAGGTCGTTCGCTCCAAGCTGGGCTGTGTGCACGAACCCCCCGTTCAGCCCGACCGCTGCGCCTTATCCGGTAACTATCGTCTTGAGTCCAACCCGGTAAGACACGACTTATC |
| | GCCACTGGCAGCAGCCACTGGTAACAGGATTAGCAGAGCGAGGTATGTAGGCGGTGCTACAGAGTTCTTGAAGTGGTGGCCTAACTACGGCTACACTAGAAGAACAGTATTTGGTATCTGCGCTCTGCTGAAGCCAGTTA |
| | CCTTCGGAAAAAGAGTTGGTAGCTCTTGATCCGGCAAACAAACCACCGCTGGTAGCGGTGGTTTTTTTGTTTGCAAGCAGCAGATTACGCGCAGAAAAAAAGGATCTCAAGAAGATCCTTTGATCTTTTCTACGGGGTCT |
| | GACGCTCAGTGGAACGAAAACTCACGTTAAGGGATTTTGGTCATGAGATTATCAAAAAGGATCTTCACCTAGATCCTTTTCACGTAGAAAGCCAGTCCGCAGAAACGGTGCTGACCCCGGATGAATGTCAGCTACTGGGC |
| | TATCTGGACAAGGGAAAACGCAAGCGCAAAGAGAAAGCAGGTAGCTTGCAGTGGGCTTACATGGCGATAGCTAGACTGGGCGGTTTTATGGACAGCAAGCGAACCGGAATTGCCAGCTGGGGCGCCCTCTGGTAAGGTTG |
| | GGAAGCCCTGCAAAGTAAACTGGATGGCTTTCTTGCCGCCAAGGATCTGATGGCGCAGGGGATCAAGATCTGATCAAGAGACAGGATGAGGATCGTTTCGCATGATTGAACAAGATGGATTGCACGCAGGTTCTCCGGCC |
| | GCTTGGGTGGAGAGGCTATTCGGCTATGACTGGGCACAACAGACAATCGGCTGCTCTGATGCCGCCGTGTTCCGGCTGTCAGCGCAGGGGCGCCCGGTTCTTTTTGTCAAGACCGACCTGTCCGGTGCCCTGAATGAACT |
| | GCAAGACGAGGCAGCGCGGCTATCGTGGCTGGCCACGACGGGCGTTCCTTGCGCAGCTGTGCTCGACGTTGTCACTGAAGCGGGAAGGGACTGGCTGCTATTGGGCGAAGTGCCGGGGCAGGATCTCCTGTCATCTCACC |
| | TTGCTCCTGCCGAGAAAGTATCCATCATGGCTGATGCAATGCGGCGGCTGCATACGCTTGATCCGGCTACCTGCCCATTCGACCACCAAGCGAAACATCGCATCGAGCGAGCACGTACTCGGATGGAAGCCGGTCTTGTC |
| | GATCAGGATGATCTGGACGAAGAGCATCAGGGGCTCGCGCCAGCCGAACTGTTCGCCAGGCTCAAGGCGAGCATGCCCGACGGCGAGGATCTCGTCGTGACCCATGGCGATGCCTGCTTGCCGAATATCATGGTGGAAAA |
| | TGGCCGCTTTTCTGGATTCATCGACTGTGGCCGGCTGGGTGTGGCGGACCGCTATCAGGACATAGCGTTGGCTACCCGTGATATTGCTGAAGAGCTTGGCGGCGAATGGGCTGACCGCTTCCTCGTGCTTTACGGTATCG |
| | CCGCTCCCGATTCGCAGCGCATCGCCTTCTATCGCCTTCTTGACGAGTTCTTCTGAATTTAAAGCCCAATACGCAAACCGCCTCTCCCCGCGCGTTGGCCGAAGCGGTTCAATATTTTGTTAAAATTCGCGTTAAATTTT |
| | TGTTAAATCAGCTATTTTTTAACCAATAGGCCGAAATCGGCAAAATCCCTTGTAAATCAAAAGAATAGACCGAGATAGGGTTGAGTGTTGTTCCAGTTTGGAACAAGAGTCCACTATTAAAGAACGTGGACTCCAACGTC |
| | AAAGGGCGAAAAACCGTCTATCAGGGCGTTGGCCCACTACGTGAACCTTCACCCTAATCAAGTTTTTTGGGGTCGAGGTGCCGTAAAGCACTAAATCGGAACCCTAAAGGGAGCCCCCGATTTAGAGCTTGACGGGGAAA |
| | CCGGCGAACGTGGCGAGAAAGGAAGGGAAGAAAGCGAAAGGAGCGGGCGCTAGGGCGCTGGCAAGTGTAGCGGTCACGCTGCGCGTAACCACCACACCCGCCGCGCTAAGCGCCGCTACAGGGCGCGTCCCTTCGCCTTC |
| | AGGCTGCGTCGAGTACTGTACTGTGAGCCAGAGTTGCCCGGCGCTCTCCGGCTGCGGTAGTTCAGGCAGTTCAATCAACTGTTTACCTTGTGGAGCGACTCCAGAGGCACTTCACCGCTTGCCAGCGGCTTACGATCCAG |
| | CGCCACGATCCAGTGCAGGAGATCGTTATCGCTATACGGAACAGGTATTCGCTGGTCACTTCGATAAGGTTTGCCCGGATAAACGGAACTGGAAAAACTGCTGCTGGTGTTTTGCTTCCGTCAGTGCTGGATCGGCGTGC |
| | GGTCGGCAAAGACCAGACCGTTCTAACAGAACTGGCGATTGTTCGGCGTATCGCCAAAATCACCGCCGTAAGCCGACCACGGGTTGCCGTTTTCAGCAGGATTTAATCAGCGACTGATCCACCCAGTCCCAGACGAAGCC |
| | GCCCTGTAAACGGGGATACTGACGAAACGCCTGCCAGTATTTAGCGAAACCGCCAAGACTGTTACCCAAGCGTGGGCGTATTCGCAAAGGATCAGCGGGCGCGTCTCTCCAGGTAGCGAAAGCCTTTTTTGATCGACCTT |
| | TCGGCACAGCCGGGAAGGGCTGGTCTTCAACCACGCGCGCGTACAACGGGCAAATAATATCGGTGGCCGTGGTGTCGGCTCCGCCGCCTTCAACTGCACCGGGCGGGAAGGATCGACAGATTTGATCCAGCGATACAGCG |
| | CGTCGTGATTAGCGCCGTGGCCTGATTCAATTCCCCAGCGACCAGTAGATCACACTCGGGTGATTACGATTGCGCTGCACCAGTCGCGTTACGGTTCGCTCTTCGCCGGTAGCCAGCGCGGATCACGGTCAGACGATTCG |
| | TTGGCACGATCCGTGGGTTTCAATACTGGCTTCAAACCACCACTAACAGGCCGTAGCGGTCGCACAGCGTGTACCACAGCGGTTGGTTCGGATAATCGAACAGCGCACGGCGTTAAAGTTGTTCTGCTTCAACAGCAGGA |
| | TATTCTGCACCTTCGTCTGCTCTTCCTAACCTGACCAAGCAGAGGATCTGCTCGTGACGGTTAATCCTCGAATCAGCAACGGCTTGCCGTTCAGCAGCAGCAGACCAAGTTCAATCCGCACCTCGCGGAAACCGACAACG |
| | CAGGCTTCTGCTTCAATCAGCGTGCCGTCGGCGGTGTGCAGTTCAACCACCGCACGATAGAGATTCGGGATTTCGGCGCTCCACAGTTTCGGGTTTTCGACGTTCAGACGTAGTGTGACGCGATCTGCAAACCACCACGC |
| | TCAACGATAATTTCACCGCCGAAAGGCGCGGTGCCGCTGGCGACCTGCGTTTCACCCTGCCAGAAAGAAACTGTTACCCGTAGGTAGTCACGCAACTCGCCGCACACTGAACTTCAGCCTCCAGTACAGCGCGGCTGAAA |
| | TCGTCTTAAAGCGAGTGGCAACTGGAAATCGCTGATTTGTGTAGTCGGTTTAGCAGCAACGAGACTTCACGGAAAATCCGCTAATCCGCCACAGATCCTGATCTTCCAGATAACTGCCGTCACTCCAACGCAGCACCTTC |
| | ACCGCGAGGCGGTTTTCTCCGGCGCGTAAAAATCGCTCAGGTCAAATTCAGACGGCAAACGACTGTCCTGGCCGTAACCGACCCAGCGCCCGTTGCACCACAGATTGAAACGCCGAGTTTACGCCTCAAAAATAATTCGC |
| | GTCTGGCCTTCCTGTAGCCAGCTTTCACAACTATAATAGTGAGCGAGTAACAACCCGTCGGATTCTCCGTGGGAACAAACGGCGGATTGACCGTATAGGGATAGGTTACGTTGGTGTAGTAGGGCGCTCCGTAACCGTGC |
| | TACTGCCAGTTTGAGGGGACGACGACAGTATCGGCCTCAGGAAGATCGCACTCCAGCCAGCTTTCCGGCACCGCTTCTGGTACTGGAAACCAGGCAAAGCGCCTATCGCCTATCAGGCTGCACAACTGTTGGGAAGGGCG |
| | ATCTGTGCGGGCCTCTTCGCTATTACGCCAGCTTGCGAAAGGGGGTAGTGCTGCAAGGCGATTAAGTTGGGTAACGCCAGGGTTTTCCCAGTCACGACGTGGATCTGGGCCACTCCCTCT |
| 466 | >pP111 |
| | CTGCGCGCTCGCTCGCTCACTGAGGCCGCCCGGGCAAAGCCCGGGCGTCGGGCGACCTTTGGTCGCCCGGCCTCAGTGAGCGAGCGAGCGCGCAGAGAGGGAGTGGCCAACTCCATCACTAGGGGTTCCTGGAGGGGTGG |
| | AGTCGTGACGTGAATTACGTCATAGGGTTAGGGAGGTCGGCCGCTCTAGGAGTTAATTTTTAAAAAGCAGTCAAAAGTCCAAGTGCCCTTGCGAGCATTTACTCTCTCTGTTTGCTCTGGTTAATAATCTCAGGAGCACA |
| | AACATTCCTTACTAGTTCTAGGAGTTAATTTTTAAAAAGCAGTCAAAAGTCCAAGTGCCCTTGCGAGCATTTACTCTCTCTGTTTGCTCTGGTTAATAATCTCAGGAGCACAAACATTCCTTACTAGTTCTAGAGCGGCC |
| | GCCAGTGTGCTGGAATTCGGCTTTTTTAGGGCTGGAAGCTACCTTTGACATCATTTCCTCTGCGAATGCATGTATAATTTCTACAGAACCTATTAGAAAGGATCACCCAGCCTCTGCTTTTGTACAACTTTCCCTTAAAA |
| | AACTGCCAATCCCACTGCTGTTTGGCCCAATAGTGAGAACTTTTTCCTGCTGCCTCTTGGTGCTTTTGCCTATGGCCCCTATTCTGCCTGCTGAAGACACTCTTGCCAGCATGGACTTAAACCCCTCCAGCTCTGACAAT |
| | CCTCTTTCTCTTTTGTTTTACATGAAGGGTCTGGCAGCCAAAGCAATCACTCAAAGTTCAAACCTTATCATTTTTTGCTTTGTTCCTCTTGGCCTTGGTTTTGTACATCAGCTTTGAAAATACCATCCCAGGGTTAATGC |
| | TGGGGTTAATTTATAACTGAGAGTGCTCTAGTTCTGCAATACAGGACATGCTATAAAAATGGAAAGATGTTGCTTTCTGAGAGATCAGCTTACATGTGGTACCGAGCTCGGATCCACTAGTAACGGCCGCCAGTGTGCTG |
| | GAATTCGGCTTTCCAGGCCATCTCCAACCATGGGAGTGAGGCACCCGCCCTGCTCCCACCGGCTCCTGGCCGTCTGCGCCCTCGTGTCCTTGGCAACCGCTCAGCAGGGAGCCAGCAGACCAGGGCCCCGGGATGCCCAG |
| | GCACACCCCGGCCGTCCCAGAGCAGTGCCCACACAGTGCGACGTCCCCCCCAACAGCCGCTTCGATTGCGCCCCTGACAAGGCCATCACCCAGGAACAGTGCGAGGCCCGCGGCTGCTGCTACATCCCTGCAAAGCAGGG |
| | GCTGCAGGGAGCCCAGATGGGGCAGCCCTGGTGCTTCTTCCCACCCAGCTACCCCAGCTACAAGCTGGAGAACCTGAGCTCCTCTGAAATGGGCTACACGGCCACCCTGACCCGTACCACCCCCACCTTCTTCCCCAAGG |
| | ACATCCTGACCCTGCGGCTGGACGTGATGATGGAGACTGAGAACCGCCTCCACTTCACGATCAAAGATCCAGCTAACAGGCGCTACGAGGTGCCCTTGGAGACCCCGCGTGTCCACAGCCGGGCACCGTCCCCACTCTAC |
| | AGCGTGGAGTTCTCCGAGGAGCCCTTCGGGGTGATCGTGCACCGGCAGCTGGACGGCCGCGTGCTGCTGAACACGACGGTGGCGCCCCTGTTCTTTGCGGACCAGTTCCTTCAGCTGTCCACCTCGCTGCCCTCGCAGTA |
| | TATCACAGGCCTCGCCGAGCACCTCAGTCCCCTGATGCTCAGCACCAGCTGGACCAGGATCACCCTGTGGAACCGGGACCTTGCGCCCACGCCCGGTGCGAACCTCTACGGGTCTCACCCTTTCTACCTGGCGCTGGAGG |
| | ACGGCGGGTCGGCACACGGGGTGTTCCTGCTAAACAGCAATGCCATGGATGTGGTCCTGCAGCCGAGCCCTGCCCTTAGCTGGAGGTCGACAGGTGGGATCCTGGATGTCTACATCTTCCTGGGCCCAGAGCCCAAGAGC |
| | GTGGTGCAGCAGTACCTGGACGTTGTGGGATACCCGTTCATGCCGCCATACTGGGGCCTGGGCTTCCACCTGTGCCGCTGGGGCTACTCCTCCACCGCTATCACCCGCCAGGTGGTGGAGAACATGACCAGGGCCCACTT |
| | CCCCCTGGACGTCCAATGGAACGACCTGGACTACATGGACTCCCGGAGGGACTTCACGTTCAACAAGGATGGCTTCCGGGACTTCCCGGCCATGGTGCAGGAGCTGCACCAGGGCGGCCGGCGCTACATGATGATCGTGG |
| | ATCCTGCCATCAGCAGCTCGGGCCCTGCCGGGAGCTACAGGCCCTACGACGAGGGTCTGCGGAGGGGGGTTTTCATCACCAACGAGACCGGCCAGCCGCTGATTGGGAAGGTATGGCCCGGGTCCACTGCCTTCCCCGAC |
| | TTCACCAACCCCACAGCCCTGGCCTGGTGGGAGGACATGGTGGCTGAGTTCCATGACCAGGTGCCCTTCGACGGCATGTGGATTGACATGAACGAGCCTTCCAACTTCATCAGAGGCTCTGAGGACGGCTGCCCCAACAA |
| | TGAGCTGGAGAACCCACCCTACGTGCCTGGGGTGGTTGGGGGGACCCTCCAGGCGGCCACCATCTGTGCCTCCAGCCACCAGTTTCTCTCCACACACTACAACCTGCACAACCTCTACGGCCTGACCGAAGCCATCGCCT |
| | CCCACAGGGCGCTGGTGAAGGCTCGGGGGACACGCCCATTTGTGATCTCCCGCTCGACCTTTGCTGGCCACGGCCGATACGCCGGCCACTGGACGGGGGACGTGTGGAGCTCCTGGGAGCAGCTCGCCTCCTCCGTGCCA |
| | GAAATCCTGCAGTTTAACCTGCTGGGGGTGCCTCTGGTCGGGGCCGACGTCTGCGGCTTCCTGGGCAACACCTCAGAGGAGCTGTGTGTGCGCTGGACCCAGCTGGGGGCCTTCTACCCCTTCATGCGGAACCACAACAG |
| | CCTGCTCAGTCTGCCCCAGGAGCCGTACAGCTTCAGCGAGCCGGCCCAGCAGGCCATGAGGAAGGCCCTCACCCTGCGCTACGCACTCCTCCCCCACCTCTACACACTGTTCCACCAGGCCCACGTCGCGGGGGAGACCG |
| | TGGCCCGGCCCCTCTTCCTGGAGTTCCCCAAGGACTCTAGCACCTGGACTGTGGACCACCAGCTCCTGTGGGGGGAGGCCCTGCTCATCACCCCAGTGCTCCAGGCCGGGAAGGCCGAAGTGACTGGCTACTTCCCCTTG |
| | GGCACATGGTACGACCTGCAGACGGTGCCAATAGAGGCCCTTGGCAGCCTCCCACCCCCACCTGCAGCTCCCCGTGAGCCAGCCATCCACAGCGAGGGGCAGTGGGTGACGCTGCCGGCCCCCCTGGACACCATCAACGT |
| | CCACCTCCGGGCTGGGTACATCATCCCCCTGCAGGGCCCTGGCCTCACAACCACAGAGTCCCGCCAGCAGCCCATGGCCCTGGCTGTGGCCCTGACCAAGGGTGGAGAGGCCCGAGGGGAGCTGTTCTGGGACGATGGAG |
| | AGAGCCTGGAAGTGCTGGAGCGAGGGGCCTACACACAGGTCATCTTCCTGGCCAGGAATAACACGATCGTGAATGAGCTGGTACGTGTGACCAGTGAGGGAGCTGGCCTGCAGCTGCAGAAGGTGACTGTCCTGGGCGTG |
| | GCCACGGCGCCCCAGCAGGTCCTCTCCAACGGTGTCCCTGTCTCCAACTTCACCTACAGCCCCGACACCAAGGTCCTGGACATCTGTGTCTCGCTGTTGATGGGAGAGCAGTTTCTCGTCAGCTGGTGTTAGCCGGGCGG |
| | AGTGTGTTAGTCTCTCCAGAGGGAGGCTGGTTCCCCAGGGAAGCAGAGCCTGTGTGCGGGCAGCAGCTGTGTGCGGGCCTGGGGGTTGTTAAGTGCAATTATTTTTAATAAAAGGGGCATTTGGAAAAAAAAAAAAAAGG |
| | TAGCAGTCGACAGATGAATTCTGCAGATCTGTGGCTTCTAGCTGCCCGGGTGGCATCCCTGTGACCCCTCCCCAGTGCCTCTCCTGGCCCTGGAAGTTGCCACTCCAGTGCCCACCAGCCTTGTCCTAATAAAATTAAGT |
| | TGCATCATTTTGTCTGACTAGGTGTCCTTCTATAATATTATGGGGTGGAGGGGGGTGGTATGGAGCAAGGGGCAAGTTGGGAAGACAACCTGAGTTGTTGGGATTCCAGGCATCGAGTAGATAAGTAGCATGGCGGGTTA |
| | ATCATTAACTACAAGGAACCCCTAGTGATGGAGTTGGCCACTCCCTCTCTGCGCGCTCGCTCGCTCACTGAGGCCGGGCGACCAAAGGTCGCCCGACGCCCGGGCTTTGCCCGGGCGGCCTCAGTGAGCGAGCGAGCGCG |
| | CAGAGAGGGACAGATCCGAAGCCGGGCAAATCAGCGCCTGGCAGCAGTGGCGTCTGGCGGAAAACCTCAGTGTGACGCTCCCCGCCGCGTCCCACGCTTGTTCCCGGATCTGACCACCAGCGAAATCCGATTTTTGCACC |
| | GAGCTGGGTAATAAGCGTTGGCAATTTAACCGCCAGTCAGGCTTTCTTTCACAGTGTGGATTGGCGATAAAAAACAACTGCTGACGCCGCTGCGCGATCAGTTCACCCGTTCACCGCTGGATAACGACTTGGCGTAAGTG |
| | AAGCGACCCGTAAGACCCTAACGCCTGGGTCGAACGCTGGAAGGCGGCGGGCCAAACCAGGCCGAAGCAGCGTTGTTGCAGTTCACGGCAGATACACTTGCTGTTGCGGTGCTGATTACGACCGCTCACTCGTGGCAGCA |
| | ACAGGGGAAAACCTTATTTATCAGCCGGAAAACCTACCGGATTGTTGGTAGTGGTCAATAGGCGATTACCGTTGTGTTGAAGTGGCGAGCGATACACCGCTTCCGGCGCGGATTGGCCTGAACTGCCAACTGGCGCAGGT |
| | AGCAGAGCGGGTAAACTGGCTCGGATTAGGGCCGCAAGAAAACTATCCCGACCGCCTTACTGCCGCCTGTTTTGACCGCTGGGATCTGCCAAGTCAGACAGTATAGCCCGTACGTCTTCCCGAGCGAAAACGGTCTGCGC |
| | TGCGGGACGCGCGAATTGAATTTGGCCCACACCAGTGGCGCGGCGACTTCCAGTTCAATATCAGCCGCTACAGTGAACAGCAACTGTTGGAAACCAGCCTTCGCCAACTGCTGCACGCGGAAGAAGGCACTGGCTGAATA |
| | TCGACGGTTTCCAGTTGGGGATTGGTGGCGACGACTCCTGGAGCCCGTCAGTATCGGCGGACTTCCAACTGAGCGCCGGTCGCTACCTTACCAGTTGGTCTGGTGTCAAAAAGCGTCCGCTTGAGTCTAGCGATCGCGCG |
| | CAGATCTGTCATGTGAGCAAAAGGCCAGCAAAAGGCCAGGAACCGTAAAAAGGCCGCGTTGCTGGCGTTTTTCCATAGGCTCCGCCCCCCTGACGAGCATCACAAAAATCGACGCTCAAGTCAGAGGTGGCGAAACCCGA |
| | CAGGACTATAAAGATACCAGGCGTTTCCCCCTGGAAGCTCCCTCGTGCGCTCTCCTGTTCCGACCCTGCCGCTTACCGGATACCTGTCCGCCTTTCTCCCTTCGGGAAGCGTGGCGCTTTCTCATAGCTCACGCTGTAGG |
| | TATCTCAGTTCGGTGTAGGTCGTTCGCTCCAAGCTGGGCTGTGTGCACGAACCCCCCGTTCAGCCCGACCGCTGCGCCTTATCCGGTAACTATCGTCTTGAGTCCAACCCGGTAAGACACGACTTATCGCCACTGGCAGC |
| | AGCCACTGGTAACAGGATTAGCAGAGCGAGGTATGTAGGCGGTGCTACAGAGTTCTTGAAGTGGTGGCCTAACTACGGCTACACTAGAAGAACAGTATTTGGTATCTGCGCTCTGCTGAAGCCAGTTACCTTCGGAAAAA |
| | GAGTTGGTAGCTCTTGATCCGGCAAACAAACCACCGCTGGTAGCGGTGGTTTTTTTGTTTGCAAGCAGCAGATTACGCGCAGAAAAAAAGGATCTCAAGAAGATCCTTTGATCTTTTCTACGGGGTCTGACGCTCAGTGG |
| | AACGAAAACTCACGTTAAGGGATTTTGGTCATGAGATTATCAAAAAGGATCTTCACCTAGATCCTTTTCACGTAGAAAGCCAGTCCGCAGAAACGGTGCTGACCCCGGATGAATGTCAGCTACTGGGCTATCTGGACAAG |
| | GGAAAACGCAAGCGCAAAGAGAAAGCAGGTAGCTTGCAGTGGGCTTACATGGCGATAGCTAGACTGGGCGGTTTTATGGACAGCAAGCGAACCGGAATTGCCAGCTGGGGCGCCCTCTGGTAAGGTTGGGAAGCCCTGCA |
| | AAGTAAACTGGATGGCTTTCTTGCCGCCAAGGATCTGATGGCGCAGGGGATCAAGATCTGATCAAGAGACAGGATGAGGATCGTTTCGCATGATTGAACAAGATGGATTGCACGCAGGTTCTCCGGCCGCTTGGGTGGAG |
| | AGGCTATTCGGCTATGACTGGGCACAACAGACAATCGGCTGCTCTGATGCCGCCGTGTTCCGGCTGTCAGCGCAGGGGCGCCCGGTTCTTTTTGTCAAGACCGACCTGTCCGGTGCCCTGAATGAACTGCAAGACGAGGC |
| | AGCGCGGCTATCGTGGCTGGCCACGACGGGCGTTCCTTGCGCAGCTGTGCTCGACGTTGTCACTGAAGCGGGAAGGGACTGGCTGCTATTGGGCGAAGTGCCGGGGCAGGATCTCCTGTCATCTCACCTTGCTCCTGCCG |
| | AGAAAGTATCCATCATGGCTGATGCAATGCGGCGGCTGCATACGCTTGATCCGGCTACCTGCCCATTCGACCACCAAGCGAAACATCGCATCGAGCGAGCACGTACTCGGATGGAAGCCGGTCTTGTCGATCAGGATGAT |
| | CTGGACGAAGAGCATCAGGGGCTCGCGCCAGCCGAACTGTTCGCCAGGCTCAAGGCGAGCATGCCCGACGGCGAGGATCTCGTCGTGACCCATGGCGATGCCTGCTTGCCGAATATCATGGTGGAAAATGGCCGCTTTTC |
| | TGGATTCATCGACTGTGGCCGGCTGGGTGTGGCGGACCGCTATCAGGACATAGCGTTGGCTACCCGTGATATTGCTGAAGAGCTTGGCGGCGAATGGGCTGACCGCTTCCTCGTGCTTTACGGTATCGCCGCTCCCGATT |
| | CGCAGCGCATCGCCTTCTATCGCCTTCTTGACGAGTTCTTCTGAATTTAAAGCCCAATACGCAAACCGCCTCTCCCCGCGCGTTGGCCGAAGCGGTTCAATATTTTGTTAAAATTCGCGTTAAATTTTTGTTAAATCAGC |
| | TATTTTTTAACCAATAGGCCGAAATCGGCAAAATCCCTTGTAAATCAAAAGAATAGACCGAGATAGGGTTGAGTGTTGTTCCAGTTTGGAACAAGAGTCCACTATTAAAGAACGTGGACTCCAACGTCAAAGGGCGAAAA |
| | ACCGTCTATCAGGGCGTTGGCCCACTACGTGAACCTTCACCCTAATCAAGTTTTTTGGGGTCGAGGTGCCGTAAAGCACTAAATCGGAACCCTAAAGGGAGCCCCCGATTTAGAGCTTGACGGGGAAACCGGCGAACGTG |
| | GCGAGAAAGGAAGGGAAGAAAGCGAAAGGAGCGGGCGCTAGGGCGCTGGCAAGTGTAGCGGTCACGCTGCGCGTAACCACCACACCCGCCGCGCTAAGCGCCGCTACAGGGCGCGTCCCTTCGCCTTCAGGCTGCGTCGA |
| | GTACTGTACTGTGAGCCAGAGTTGCCCGGCGCTCTCCGGCTGCGGTAGTTCAGGCAGTTCAATCAACTGTTTACCTTGTGGAGCGACTCCAGAGGCACTTCACCGCTTGCCAGCGGCTTACGATCCAGCGCCACGATCCA |
| | GTGCAGGAGATCGTTATCGCTATACGGAACAGGTATTCGCTGGTCACTTCGATAAGGTTTGCCCGGATAAACGGAACTGGAAAAACTGCTGCTGGTGTTTTGCTTCCGTCAGTGCTGGATCGGCGTGCGGTCGGCAAAGA |
| | CCAGACCGTTCTAACAGAACTGGCGATTGTTCGGCGTATCGCCAAAATCACCGCCGTAAGCCGACCACGGGTTGCCGTTTTCAGCAGGATTTAATCAGCGACTGATCCACCCAGTCCCAGACGAAGCCGCCCTGTAAACG |
| | GGGATACTGACGAAACGCCTGCCAGTATTTAGCGAAACCGCCAAGACTGTTACCCAAGCGTGGGCGTATTCGCAAAGGATCAGCGGGCGCGTCTCTCCAGGTAGCGAAAGCCTTTTTTGATCGACCTTTCGGCACAGCCG |
| | GGAAGGGCTGGTCTTCAACCACGCGCGCGTACAACGGGCAAATAATATCGGTGGCCGTGGTGTCGGCTCCGCCGCCTTCAACTGCACCGGGCGGGAAGGATCGACAGATTTGATCCAGCGATACAGCGCGTCGTGATTAG |
| | CGCCGTGGCCTGATTCAATTCCCCAGCGACCAGTAGATCACACTCGGGTGATTACGATTGCGCTGCACCAGTCGCGTTACGGTTCGCTCTTCGCCGGTAGCCAGCGCGGATCACGGTCAGACGATTCGTTGGCACGATCC |
| | GTGGGTTTCAATACTGGCTTCAAACCACCACTAACAGGCCGTAGCGGTCGCACAGCGTGTACCACAGCGGTTGGTTCGGATAATCGAACAGCGCACGGCGTTAAAGTTGTTCTGCTTCAACAGCAGGATATTCTGCACCT |
| | TCGTCTGCTCTTCCTAACCTGACCAAGCAGAGGATCTGCTCGTGACGGTTAATCCTCGAATCAGCAACGGCTTGCCGTTCAGCAGCAGCAGACCAAGTTCAATCCGCACCTCGCGGAAACCGACAACGCAGGCTTCTGCT |
| | TCAATCAGCGTGCCGTCGGCGGTGTGCAGTTCAACCACCGCACGATAGAGATTCGGGATTTCGGCGCTCCACAGTTTCGGGTTTTCGACGTTCAGACGTAGTGTGACGCGATCTGCAAACCACCACGCTCAACGATAATT |
| | TCACCGCCGAAAGGCGCGGTGCCGCTGGCGACCTGCGTTTCACCCTGCCAGAAAGAAACTGTTACCCGTAGGTAGTCACGCAACTCGCCGCACACTGAACTTCAGCCTCCAGTACAGCGCGGCTGAAATCGTCTTAAAGC |
| | GAGTGGCAACTGGAAATCGCTGATTTGTGTAGTCGGTTTAGCAGCAACGAGACTTCACGGAAAATCCGCTAATCCGCCACAGATCCTGATCTTCCAGATAACTGCCGTCACTCCAACGCAGCACCTTCACCGCGAGGCGG |
| | TTTTCTCCGGCGCGTAAAAATCGCTCAGGTCAAATTCAGACGGCAAACGACTGTCCTGGCCGTAACCGACCCAGCGCCCGTTGCACCACAGATTGAAACGCCGAGTTTACGCCTCAAAAATAATTCGCGTCTGGCCTTCC |
| | TGTAGCCAGCTTTCACAACTATAATAGTGAGCGAGTAACAACCCGTCGGATTCTCCGTGGGAACAAACGGCGGATTGACCGTATAGGGATAGGTTACGTTGGTGTAGTAGGGCGCTCCGTAACCGTGCTACTGCCAGTTT |
| | GAGGGGACGACGACAGTATCGGCCTCAGGAAGATCGCACTCCAGCCAGCTTTCCGGCACCGCTTCTGGTACTGGAAACCAGGCAAAGCGCCTATCGCCTATCAGGCTGCACAACTGTTGGGAAGGGCGATCTGTGCGGGC |
| | CTCTTCGCTATTACGCCAGCTTGCGAAAGGGGGTAGTGCTGCAAGGCGATTAAGTTGGGTAACGCCAGGGTTTTCCCAGTCACGACGTGGATCTGGGCCACTCCCTCT |

| pP065_seq100_29-56 deletion (SEQ ID NO: 470) | |
|---|---|
| (SEQ ID NO: 470) | |
| 1 | tctagagcta gcatatggat ccatcgattt agggataaca gggtaattat cagcacacaa |
| 61 | ttgcccatta tacgcgcgta taatggacta ttgtgtgctg atatctgtac acttaagggc |
| 121 | tagatcttag cttacgtcac tagagggtcc acgtttagtt tttaagatcc attgatctcc |
| 181 | taaacgctgc aagattcgca acctggtata cttagcctag gcgctaggtc ctagtgcagc |
| 241 | gggacttttt ttctaaagtc gttgagagga ggagtcgtca gaccagatag ctttgatgtc |
| 301 | ctgatcggaa ggatcgttgg cccccctgca ggcagctgtt aattaactgc gcgctcgctc |
| 361 | gctcactgag gccgcccggg caaagcccgg gcgtcgggcg acctttggtc gcccggcctc |
| 421 | agtgagcgag cgagcgcgca gagagggagt ggccaactcc atcactaggg gttccttgta |
| 481 | gttaatgatt aacccgccat gctacttatc tacggcgcgc cacgcgttct aggagttaat |
| 541 | ttttaaaaag cagtcaaaag tccaagtgcc cttgcgagca tttactctct ctgtttgctc |
| 601 | tggttaataa tctcaggagc acaaacattc cttactagtt ctaggagtta atttttaaaa |
| 661 | agcagtcaaa agtccaagtg cccttgcgag catttactct ctctgtttgc tctggttaat |
| 721 | aatctcagga gcacaaacat tccttactag ttctagagcg gccgccagtg tgctggaatt |
| 781 | cggctttttt agggctggaa gctacctttg acatcatttc ctctgcgaat gcatgtataa |
| 841 | tttctacaga acctattaga aaggatcacc cagcctctgc ttttgtacaa ctttccctta |
| 901 | aaaaactgcc aatcccactg ctgtttggcc caatagtgag aactttttcc tgctgcctct |
| 961 | tggtgctttt gcctatggcc cctattctgc ctgctgaaga cactcttgcc agcatggact |
| 1021 | taaacccctc cagctctgac aatcctcttt ctcttttgtt ttacatgaag ggtctggcag |
| 1081 | ccaaagcaat cactcaaagt tcaaacctta tcattttttg ctttgttcct cttggccttg |
| 1141 | gttttgtaca tcagctttga aaataccatc ccagggttaa tgctggggtt aatttataac |
| 1201 | tgagagtgct ctagttctgc aatacaggac atgctataaa aatggaaaga tgttgctttc |
| 1261 | tgagagatca ggtggattct tgggcatttg cttaagcttg gtaccgccac catgggggtg |
| 1321 | aggcaccctc cctgttctca caggctgctg gctgtgtgtg ctctggtgtc tctggccact |
| 1381 | gctgccctgc tgggccagca gggggccagc aggccaggcc ccagggatgc ccaggcccac |
| 1441 | cctggcagac ccagggctgt gcccacccag tgtgatgtgc ctcccaacag cagatttgac |
| 1501 | tgtgcccctg ataaggccat tactcaggaa cagtgtgagg ccaggggctg ctgctatatc |
| 1561 | cctgccaagc agggcctgca gggggcccag atggggcagc cctggtgctt cttccccccc |
| 1621 | agctacccct cttataagct ggagaatctg agcagctctg aaatgggcta cactgccact |
| 1681 | ctgaccagga ctacccccac cttcttcccc aaggatattc tgactctgag gctggatgtg |
| 1741 | atgatggaga ctgagaacag gctgcacttc accatcaagg accctgccaa caggaggtat |
| 1801 | gaggtgcccc tggaaactcc cagggtgcac tctagggccc ccagccccct gtattctgtg |
| 1861 | gagttctctg aggagccttt tggggtcatt gtccacaggc agctggatgg cagggtgctg |
| 1921 | ctgaatacta ctgtggcccc tctgttcttt gctgaccagt tcctgcagct gagcaccagc |
| 1981 | ctgccttctc agtacattac tggcctggct gagcatctga gccccctgat gctgagcacc |
| 2041 | tcttggacca gaatcaccct gtggaacagg gacctggctc ccactcctgg ggccaacctg |
| 2101 | tatggcagcc accccttcta cctggccctg gaggatgggg gctctgccca tggggtgttc |
| 2161 | ctgctgaaca gcaatgccat ggatgtggtg ctgcagccct ctcctgccct gtcttggaga |
| 2221 | tctactgggg gcatcctgga tgtgtatatc ttcctggggc ctgagcccaa gtctgtggtg |
| 2281 | cagcagtacc tggatgtggt gggctacccc ttcatgcccc cctactgggg cctgggcttc |
| 2341 | cacctgtgca ggtggggcta ctcttctact gctatcacca ggcaggtggt ggagaacatg |
| 2401 | accagggctc acttccctct ggatgtgcag tggaatgacc tggactacat ggactctagg |
| 2461 | agagacttca cttttaataa ggatgggttc agggactttc ctgccatggt gcaggagctg |
| 2521 | catcaggggg gcaggagata tatgatgatt gtggaccctg ctatttctag ctctggccct |
| 2581 | gctggcagct ataggcccta tgatgagggg ctgaggaggg gggtgttcat cactaatgag |
| 2641 | actggccagc ccctgattgg caaggtgtgg cctggctcta ctgccttccc tgatttcacc |
| 2701 | aaccccactg ccctggcctg gtgggaggat atggtggctg agtttcatga ccaggtgccc |
| 2761 | tttgatggca tgtggattga catgaatgag cccagcaact ttatcagggg ctctgaagat |
| 2821 | ggctgcccca acaatgagct ggagaacccc ccctatgtgc ctggggtggt ggggggcacc |
| 2881 | ctgcaggctg ccaccatctg tgccagcagc caccagttcc tgagcaccca ctataacctg |
| 2941 | cacaacctgt atggcctgac tgaggccatt gcctctcaca gggccctggt gaaggctagg |
| 3001 | gggactaggc cctttgtgat cagcaggtct acttttgctg gccatggcag gtatgctggg |
| 3061 | cactggactg gggatgtgtg gtctagctgg gagcagctgg ccagctctgt gcctgagatc |
| 3121 | ctgcagttta atctgctggg ggtgcccctg gtgggggctg atgtgtgtgg cttcctgggc |
| 3181 | aatacctctg aggagctgtg tgtgaggtgg actcagctgg gggctttcta ccccttcatg |
| 3241 | agaaaccaca actctctgct gagcctgccc caggagccct attctttttc tgagcctgcc |
| 3301 | cagcaggcta tgaggaaggc cctgactctg aggtatgccc tgctgcccca cctgtatacc |
| 3361 | ctgttccatc aggcccatgt ggctggggag actgtggcca gacctctgtt cctggagttc |
| 3421 | cccaaggata gctctacttg gactgtggac caccagctgc tgtgggggga ggctctgctg |
| 3481 | atcacccctg tgctgcaggc tgggaaggct gaggtgactg gctatttccc cctgggcacc |
| 3541 | tggtatgatc tgcagactgt gcccattgag gccctgggct ctctgccccc tccccctgct |
| 3601 | gcccccaggg agcctgccat ccactctgag ggccagtggg tgaccctgcc tgcccctctg |
| 3661 | gacactatca atgtgcacct gagggctggc tacatcatcc ccctgcaggg ccctggcctg |
| 3721 | actaccactg agtctaggca gcagcccatg gccctggctg tggctctgac caaggggggg |
| 3781 | gaggccaggg gggagctgtt ctgggatgat ggggagtctc tggaggtgct ggagaggggg |
| 3841 | gcctacaccc aggtgatctt cctggctagg aataacacca ttgtcaatga gctggtgagg |
| 3901 | gtgacctctg agggggctgg cctgcagctg cagaaggtga ctgtgctggg ggtggctact |
| 3961 | gccccccagc aggtgctgag caatggggtg cctgtgagca acttcaccta tagccctgac |
| 4021 | accaaggtgc tggacatctg tgtgagcctg ctgatggggg agcagttcct ggtgagctgg |
| 4081 | tgctaattta aatctcgagc cgggcggagt gtgttagtct ctccagaggg aggctggttc |
| 4141 | cccagggaag cagagcctgt gtgcgggcag cagctgtgtg cgggcctggg ggttgttaag |
| 4201 | tgcaattatt tttaataaaa ggggcatttg gaaaaaaaaa aaaaaggtag cagtcgacag |
| 4261 | atgaattctg cagatctgtg gcttctagct gcccgggtgg catccctgtg acccctcccc |
| 4321 | agtgcctctc ctggccctgg aagttgccac tccagtgccc accagccttg tcctaataaa |
| 4381 | attaagttgc atcattttgt ctgactaggt gtccttctat aatattatgg ggtggagggg |
| 4441 | ggtggtatgg agcaaggggc aagttgggaa gacaacctgt agggcctgcg gggtctattg |
| 4501 | ggaaccaagc tggagtgcag tggcacaatc ttggctcact gcaatctccg cctcctgggt |
| 4561 | tcaagcgatt ctcctgcctc agcctcccga gttgttggga ttccaggcat gcatgaccag |
| 4621 | gctcagctaa tttttgtttt tttggtagag acggggtttc accatattgg ccaggctggt |
| 4681 | ctccaactcc taatctcagg tgatctaccc accttggcct cccaaattgc tgggattaca |
| 4741 | ggcgtgaacc actgctccct tccctgtcct tctgatttta aaaaaaagag aaatgttctg |
| 4801 | gcacctgcac ttgcactggg gacagcctat tttgctagtt tgttttgttt cgttttgttt |
| 4861 | tgatggagag cgtatgttgt ttaaacgcgg ccgcgtagat aagtagcatg gcgggttaat |
| 4921 | cattaactac aaggaacccc tagtgatgga gttggccact ccctctctgc gcgctcgctc |
| 4981 | gctcactgag gccgggcgac caaaggtcgc ccgacgcccg ggctttgccc gggcggcctc |
| 5041 | agtgagcgag cgagcgcgca gttaattaag gcgccctagg ccgaccctta gactctgtac |
| 5101 | tcagttctat aaacgagcca ttggatacga gatccgtaga ttgataaggg acacggaata |
| 5161 | tccccggacg caatagacac cggtggacag cttggtatcc tgagcacagt cgcgcgtccg |
| 5221 | aatctagctc tactttagag gccccggatt ctgatggtcg tagaccgcag aaccgattgg |
| 5281 | ggggatgaga tctactagtt atcagcacac aattgcccat tatacgcgcg tataatggac |
| 5341 | tattgtgtgc tgatataggg ataacagggt aattctagag ctagcatatg gatccatcga |
| 5401 | tttgatgcgg tattttctcc ttacgcatct gtgcggtatt tcacaccgca tacgtcaaag |
| 5461 | caaccatagt acgcgccctg tagcggcgca ttaagcgcgg cgggtgtggt ggttacgcgc |
| 5521 | agcgtgaccg ctacacttgc cagcgcccta gcgcccgctc ctttcgcttt cttcccttcc |
| 5581 | tttctcgcca cgttcgccgg ctttccccgt caagctctaa atcgggggct ccctttaggg |
| 5641 | ttccgattta gtgctttacg gcacctcgac cccaaaaaac ttgatttggg tgatggttca |
| 5701 | cgtagtgggc catcgccctg atagacggtt tttcgccctt tgacgttgga gtccacgttc |
| 5761 | tttaatagtg gactcttgtt ccaaactgga acaacactca actctatctc gggctattct |
| 5821 | tttgatttat aagggatttt gccgatttcg gtctattggt taaaaaatga gctgatttaa |
| 5881 | caaaaattta acgcgaattt taacaaaata ttaacgttta caattttatg gtgcactctc |
| 5941 | agtacaatct gctctgatgc cgcatagtta agccagcccc gacacccgcc aacacccgct |
| 6001 | gacgcgccct gacgggcttg tctgctcccg gcatccgctt acagacaagc tgtgaccgtc |
| 6061 | tccgggagct gcatgtgtca gaggttttca ccgtcatcac cgaaacgcgc gagacgaaag |
| 6121 | ggcctcgtga tacgcctatt tttataggtt aatgtcatga taataatggt ttcttagacg |
| 6181 | tcaggtggca cttttcgggg aaatgtgcgc ggaaccccta tttgtttatt tttctaaata |
| 6241 | cattcaaata tgtatccgct catgagacaa taaccctgat aaatgcttca ataatattga |
| 6301 | aaaaggaaga gtatgagcca tattcaacgg gaaacgtcga ggccgcgatt aaattccaac |
| 6361 | atggatgctg atttatatgg gtataaatgg gctcgcgata atgtcgggca atcaggtgcg |
| 6421 | acaatctatc gcttgtatgg gaagcccgat gcgccagagt tgtttctgaa acatggcaaa |
| 6481 | ggtagcgttg ccaatgatgt tacagatgag atggtcagac taaactggct gacggaattt |
| 6541 | atgcctcttc cgaccatcaa gcattttatc cgtactcctg atgatgcatg gttactcacc |
| 6601 | actgcgatcc ccggaaaaac agcattccag gtattagaag aatatcctga ttcaggtgaa |
| 6661 | aatattgttg atgcgctggc agtgttcctg cgccggttgc attcgattcc tgtttgtaat |
| 6721 | tgtcctttta acagcgatcg cgtatttcgt ctcgctcagg cgcaatcacg aatgaataac |
| 6781 | ggtttggttg atgcgagtga ttttgatgac gagcgtaatg gctggcctgt tgaacaagtc |
| 6841 | tggaaagaaa tgcataaact tttgccattc tcaccggatt cagtcgtcac tcatggtgat |
| 6901 | ttctcacttg ataaccttat ttttgacgag gggaaattaa taggttgtat tgatgttgga |
| 6961 | cgagtcggaa tcgcagaccg ataccaggat cttgccatcc tatggaactg cctcggtgag |
| 7021 | ttttctcctt cattacagaa acggcttttt caaaaatatg gtattgataa tcctgatatg |
| 7081 | aataaattgc agtttcattt gatgctcgat gagtttttct aagcgtataa tggtctagag |
| 7141 | ctagcatatg gatccatcga ttccattata cgcctgtcag accaagttta ctcatatata |
| 7201 | ctttagattg atttaaaact tcatttttaa tttaaaagga tctaggtgaa gatccttttt |
| 7261 | gataatctca tgaccaaaat cccttaacgt gagttttcgt tccactgagc gtcagacccc |
| 7321 | gtagaaaaga tcaaaggatc ttcttgagat cctttttttc tgcgcgtaat ctgctgcttg |
| 7381 | caaacaaaaa aaccaccgct accagcggtg gtttgtttgc cggatcaaga gctaccaact |
| 7441 | ctttttccga aggtaactgg cttcagcaga gcgcagatac caaatactgt tcttctagtg |
| 7501 | tagccgtagt taggccacca cttcaagaac tctgtagcac cgcctacata cctcgctctg |
| 7561 | ctaatcctgt taccagtggc tgctgccagt ggcgataagt cgtgtcttac cgggttggac |
| 7621 | tcaagacgat agttaccgga taaggcgcag cggtcgggct gaacgggggg ttcgtgcaca |
| 7681 | cagcccagct tggagcgaac gacctacacc gaactgagat acctacagcg tgagctatga |
| 7741 | gaaagcgcca cgcttcccga agggagaaag gcggacaggt atccggtaag cggcagggtc |
| 7801 | ggaacaggag agcgcacgag ggagcttcca gggggaaacg cctggtatct ttatagtcct |
| 7861 | gtcgggtttc gccacctctg acttgagcgt cgatttttgt gatgctcgtc aggggggcgg |
| 7921 | agcctatgga aaaacgccag caacgcggcc tttttacggt tcctggcctt ttgctggcct |
| 7981 | tttgctcaca |

| pP066_seq3_29-56 deletion (SEQ ID NO: 471) | |
|---|---|
| (SEQ ID NO: 471) | |
| 1 | tctagagcta gcatatggat ccatcgattt agggataaca gggtaattat cagcacacaa |
| 61 | ttgcccatta tacgcgcgta taatggacta ttgtgtgctg atatctgtac acttaagggc |
| 121 | tagatcttag cttacgtcac tagagggtcc acgtttagtt tttaagatcc attgatctcc |
| 181 | taaacgctgc aagattcgca acctggtata cttagcctag gcgctaggtc ctagtgcagc |
| 241 | gggacttttt ttctaaagtc gttgagagga ggagtcgtca gaccagatag ctttgatgtc |
| 301 | ctgatcggaa ggatcgttgg cccccctgca ggcagctgtt aattaactgc gcgctcgctc |
| 361 | gctcactgag gccgcccggg caaagcccgg gcgtcgggcg acctttggtc gcccggcctc |
| 421 | agtgagcgag cgagcgcgca gagagggagt ggccaactcc atcactaggg gttccttgta |
| 481 | gttaatgatt aacccgccat gctacttatc tacggcgcgc cacgcgttct aggagttaat |
| 541 | ttttaaaaag cagtcaaaag tccaagtgcc cttgcgagca tttactctct ctgtttgctc |
| 601 | tggttaataa tctcaggagc acaaacattc cttactagtt ctaggagtta atttttaaaa |
| 661 | agcagtcaaa agtccaagtg cccttgcgag catttactct ctctgtttgc tctggttaat |
| 721 | aatctcagga gcacaaacat tccttactag ttctagagcg gccgccagtg tgctggaatt |
| 781 | cggctttttt agggctggaa gctacctttg acatcatttc ctctgcgaat gcatgtataa |
| 841 | tttctacaga acctattaga aaggatcacc cagcctctgc ttttgtacaa ctttccctta |
| 901 | aaaaactgcc aatcccactg ctgtttggcc caatagtgag aactttttcc tgctgcctct |
| 961 | tggtgctttt gcctatggcc cctattctgc ctgctgaaga cactcttgcc agcatggact |
| 1021 | taaacccctc cagctctgac aatcctcttt ctcttttgtt ttacatgaag ggtctggcag |
| 1081 | ccaaagcaat cactcaaagt tcaaacctta tcattttttg ctttgttcct cttggccttg |
| 1141 | gttttgtaca tcagctttga aaataccatc ccagggttaa tgctggggtt aatttataac |
| 1201 | tgagagtgct ctagttctgc aatacaggac atgctataaa aatggaaaga tgttgctttc |
| 1261 | tgagagatca ggtggattct tgggcatttg cttaagcttg gtaccgccac catgggagtg |
| 1321 | agacatcctc cttgttctca tagactgctg gctgtgtgtg ctctggtgtc tctggctaca |
| 1381 | gctgctctgc tgggacagca gggagcttct agacctggac ctagagatgc tcaggctcat |
| 1441 | cctggaagac ctagagctgt gcctacacag tgtgatgtgc ctcctaattc tagatttgat |
| 1501 | tgtgctcctg ataaggctat aacacaggag cagtgtgagg ctagaggatg ttgttatatt |
| 1561 | cctgctaagc agggactgca gggagctcag atgggacagc cttggtgttt ttttcctcct |
| 1621 | tcttatcctt cttataagct ggagaatctg tcttcttctg agatgggata tacagctaca |
| 1681 | ctgacaagaa caacacctac attttttcct aaggatattc tgacactgag actggatgtg |
| 1741 | atgatggaga cagagaatag actgcatttt acaattaagg atcctgctaa tagaagatat |
| 1801 | gaggtgcctc tagagacacc tagagtgcat tctagagctc cttctcctct gtattctgtg |
| 1861 | gagttttctg aggagccttt tggagtgatt gtgcatagac agctggatgg aagagtgctg |
| 1921 | ctgaatacaa cagtggctcc tctgtttttt gctgatcagt ttctgcagct gtctacatct |
| 1981 | ctgccttctc agtatattac aggactggct gagcatctgt ctcctctgat gctgtctaca |
| 2041 | tcttggacaa gaattacact gtggaataga gatctggctc ctacacctgg agctaatctg |
| 2101 | tatggatctc atccttttta tctggctctg gaggatggag gatctgctca tggagtgttt |
| 2161 | ctgctgaatt ctaatgctat ggatgtagtg ctgcagcctt ctcctgctct gtcttggaga |
| 2221 | tctacaggag gaattctgga tgtgtatatt tttctaggac ctgagcctaa gtctgtggtg |
| 2281 | cagcagtatc tggatgtagt gggatatcct tttatgcctc cttattgggg actgggattt |
| 2341 | catctgtgta gatggggata ttcttctaca gctattacaa gacaggtggt tgagaatatg |
| 2401 | acaagagctc attttcctct ggatgtgcag tggaatgatc tagattatat ggattctaga |
| 2461 | agagatttta catttaataa ggatggattt agagattttc ctgctatggt gcaggagctg |
| 2521 | catcagggag gaagaagata tatgatgatt gtggatcctg ctatttcttc ttctggacct |
| 2581 | gctggatctt atagacctta tgatgaggga ctgagaagag gagtgtttat tacaaatgag |
| 2641 | acaggacagc ctctgattgg aaaggtgtgg cctggatcta cagcttttcc tgattttaca |
| 2701 | aatcctacag ctctggcttg gtgggaggat atggtggctg agtttcatga tcaggtgcct |
| 2761 | tttgatggaa tgtggattga tatgaatgag ccttctaatt ttataagagg atctgaggat |
| 2821 | ggatgtccta ataatgagct agagaatcct ccttatgtgc ctggagtagt gggaggaaca |
| 2881 | ctgcaggctg ctacaatttg tgcttcttct catcagtttc tgtctacaca ttataatctg |
| 2941 | cataatctgt atggactgac agaggctatt gcttctcata gagctctggt gaaggctaga |
| 3001 | ggaacaagac cttttgtgat ttctagatct acatttgctg gacatggaag atatgctgga |
| 3061 | cattggacag gagatgtatg gtcttcttgg gagcagctag cttcttctgt gcctgagatt |
| 3121 | ctgcagttta atctgctagg agtgcctctg gtgggagctg atgtgtgtgg atttctggga |
| 3181 | aatacatctg aggagctgtg tgtgagatgg acacagctgg gagcttttta tccttttatg |
| 3241 | agaaatcata attctctgct gtctctgcct caggagcctt attctttttc tgagcctgct |
| 3301 | cagcaggcta tgagaaaggc tctgacactg agatatgctc tgctgcctca tctgtataca |
| 3361 | ctgtttcatc aggctcatgt ggctggagag acagtagcta gacctctgtt tctggagttt |
| 3421 | cctaaggatt cttctacatg gacagttgat catcagctgc tgtggggaga ggctctgctg |
| 3481 | attacacctg tgctgcaggc tggaaaggct gaggtgacag gatattttcc tctgggaaca |
| 3541 | tggtatgatc tgcagacagt gcctatagag gctctgggat ctctgcctcc tcctcctgct |
| 3601 | gctcctagag agcctgctat tcattctgag ggacagtggg tgacactgcc tgctcctctg |
| 3661 | gatacaatta atgtgcatct gagagctgga tatattattc ctctgcaggg acctggactg |
| 3721 | acaacaacag agtctagaca gcagcctatg gctctggctg tggctctgac aaagggagga |
| 3781 | gaggctagag gagagctgtt ttgggatgat ggagagtctc tggaggtgct ggagagagga |
| 3841 | gcttatacac aggtgatttt tctggctaga aataatacaa ttgtgaatga gctggtgaga |
| 3901 | gtgacatctg agggagctgg actgcagctg cagaaggtga cagtgctggg agtggctaca |
| 3961 | gctcctcagc aggtgctgtc taatggagtg cctgtgtcta attttacata ttctcctgat |
| 4021 | acaaaggtgc tggatatttg tgtgtctctg ctgatgggag agcagtttct ggtgtcttgg |
| 4081 | tgttaatgat ttaaatctcg agccgggcgg agtgtgttag tctctccaga gggaggctgg |
| 4141 | ttccccaggg aagcagagcc tgtgtgcggg cagcagctgt gtgcgggcct gggggttgtt |
| 4201 | aagtgcaatt atttttaata aaaggggcat ttggaaaaaa aaaaaaaagg tagcagtcga |
| 4261 | cagatgaatt ctgcagatct gtggcttcta gctgcccggg tggcatccct gtgacccctc |
| 4321 | cccagtgcct ctcctggccc tggaagttgc cactccagtg cccaccagcc ttgtcctaat |
| 4381 | aaaattaagt tgcatcattt tgtctgacta ggtgtccttc tataatatta tggggtggag |
| 4441 | gggggtggta tggagcaagg ggcaagttgg gaagacaacc tgtagggcct gcggggtcta |
| 4501 | ttgggaacca agctggagtg cagtggcaca atcttggctc actgcaatct ccgcctcctg |
| 4561 | ggttcaagcg attctcctgc ctcagcctcc cgagttgttg ggattccagg catgcatgac |
| 4621 | caggctcagc taatttttgt ttttttggta gagacggggt ttcaccatat tggccaggct |
| 4681 | ggtctccaac tcctaatctc aggtgatcta cccaccttgg cctcccaaat tgctgggatt |
| 4741 | acaggcgtga accactgctc ccttccctgt ccttctgatt ttaaaaaaaa gagaaatgtt |
| 4801 | ctggcacctg cacttgcact ggggacagcc tattttgcta gtttgttttg tttcgttttg |
| 4861 | ttttgatgga gagcgtatgt tgtttaaacg cggccgcgta gataagtagc atggcgggtt |
| 4921 | aatcattaac tacaaggaac ccctagtgat ggagttggcc actccctctc tgcgcgctcg |
| 4981 | ctcgctcact gaggccgggc gaccaaaggt cgcccgacgc ccgggctttg cccgggcggc |
| 5041 | ctcagtgagc gagcgagcgc gcagttaatt aaggcgccct aggccgaccc ttagactctg |
| 5101 | tactcagttc tataaacgag ccattggata cgagatccgt agattgataa gggacacgga |
| 5161 | atatccccgg acgcaataga caccggtgga cagcttggta tcctgagcac agtcgcgcgt |
| 5221 | ccgaatctag ctctacttta gaggccccgg attctgatgg tcgtagaccg cagaaccgat |
| 5281 | tggggggatg agatctacta gttatcagca cacaattgcc cattatacgc gcgtataatg |
| 5341 | gactattgtg tgctgatata gggataacag ggtaattcta gagctagcat atggatccat |
| 5401 | cgatttgatg cggtattttc tccttacgca tctgtgcggt atttcacacc gcatacgtca |
| 5461 | aagcaaccat agtacgcgcc ctgtagcggc gcattaagcg cggcgggtgt ggtggttacg |
| 5521 | cgcagcgtga ccgctacact tgccagcgcc ctagcgcccg ctcctttcgc tttcttccct |
| 5581 | tcctttctcg ccacgttcgc cggctttccc cgtcaagctc taaatcgggg gctcccttta |
| 5641 | gggttccgat ttagtgcttt acggcacctc gaccccaaaa aacttgattt gggtgatggt |
| 5701 | tcacgtagtg ggccatcgcc ctgatagacg gtttttcgcc ctttgacgtt ggagtccacg |
| 5761 | ttctttaata gtggactctt gttccaaact ggaacaacac tcaactctat ctcgggctat |
| 5821 | tcttttgatt tataagggat tttgccgatt tcggtctatt ggttaaaaaa tgagctgatt |
| 5881 | taacaaaaat ttaacgcgaa ttttaacaaa atattaacgt ttacaatttt atggtgcact |
| 5941 | ctcagtacaa tctgctctga tgccgcatag ttaagccagc cccgacaccc gccaacaccc |
| 6001 | gctgacgcgc cctgacgggc ttgtctgctc ccggcatccg cttacagaca agctgtgacc |
| 6061 | gtctccggga gctgcatgtg tcagaggttt tcaccgtcat caccgaaacg cgcgagacga |
| 6121 | aagggcctcg tgatacgcct atttttatag gttaatgtca tgataataat ggtttcttag |
| 6181 | acgtcaggtg gcacttttcg gggaaatgtg cgcggaaccc ctatttgttt atttttctaa |
| 6241 | atacattcaa atatgtatcc gctcatgaga caataaccct gataaatgct tcaataatat |
| 6301 | tgaaaaagga agagtatgag ccatattcaa cgggaaacgt cgaggccgcg attaaattcc |
| 6361 | aacatggatg ctgatttata tgggtataaa tgggctcgcg ataatgtcgg gcaatcaggt |
| 6421 | gcgacaatct atcgcttgta tgggaagccc gatgcgccag agttgtttct gaaacatggc |
| 6481 | aaaggtagcg ttgccaatga tgttacagat gagatggtca gactaaactg gctgacggaa |
| 6541 | tttatgcctc ttccgaccat caagcatttt atccgtactc ctgatgatgc atggttactc |
| 6601 | accactgcga tccccggaaa aacagcattc caggtattag aagaatatcc tgattcaggt |
| 6661 | gaaaatattg ttgatgcgct ggcagtgttc ctgcgccggt tgcattcgat tcctgtttgt |
| 6721 | aattgtcctt ttaacagcga tcgcgtattt cgtctcgctc aggcgcaatc acgaatgaat |
| 6781 | aacggtttgg ttgatgcgag tgattttgat gacgagcgta atggctggcc tgttgaacaa |
| 6841 | gtctggaaag aaatgcataa acttttgcca ttctcaccgg attcagtcgt cactcatggt |
| 6901 | gatttctcac ttgataacct tatttttgac gaggggaaat taataggttg tattgatgtt |
| 6961 | ggacgagtcg gaatcgcaga ccgataccag gatcttgcca tcctatggaa ctgcctcggt |
| 7021 | gagttttctc cttcattaca gaaacggctt tttcaaaaat atggtattga taatcctgat |
| 7081 | atgaataaat tgcagtttca tttgatgctc gatgagtttt tctaagcgta taatggtcta |
| 7141 | gagctagcat atggatccat cgattccatt atacgcctgt cagaccaagt ttactcatat |
| 7201 | atactttaga ttgatttaaa acttcatttt taatttaaaa ggatctaggt gaagatcctt |
| 7261 | tttgataatc tcatgaccaa aatcccttaa cgtgagtttt cgttccactg agcgtcagac |
| 7321 | cccgtagaaa agatcaaagg atcttcttga gatccttttt ttctgcgcgt aatctgctgc |
| 7381 | ttgcaaacaa aaaaaccacc gctaccagcg gtggtttgtt tgccggatca agagctacca |
| 7441 | actctttttc cgaaggtaac tggcttcagc agagcgcaga taccaaatac tgttcttcta |
| 7501 | gtgtagccgt agttaggcca ccacttcaag aactctgtag caccgcctac atacctcgct |
| 7561 | ctgctaatcc tgttaccagt ggctgctgcc agtggcgata agtcgtgtct taccgggttg |
| 7621 | gactcaagac gatagttacc ggataaggcg cagcggtcgg gctgaacggg gggttcgtgc |
| 7681 | acacagccca gcttggagcg aacgacctac accgaactga gatacctaca gcgtgagcta |
| 7741 | tgagaaagcg ccacgcttcc cgaagggaga aaggcggaca ggtatccggt aagcggcagg |
| 7801 | gtcggaacag gagagcgcac gagggagctt ccagggggaa acgcctggta tctttatagt |
| 7861 | cctgtcgggt ttcgccacct ctgacttgag cgtcgatttt tgtgatgctc gtcagggggg |
| 7921 | cggagcctat ggaaaaacgc cagcaacgcg gcctttttac ggttcctggc cttttgctgg |
| 7981 | ccttttgctc acatgt |

| pP067_seq100-IL2wt_2-27 and 32-56 deletion (SEQ ID NO: 472) | |
|---|---|
| (SEQ ID NO: 472) | |
| 1 | tctagagcta gcatatggat ccatcgattt agggataaca gggtaattat cagcacacaa |
| 61 | ttgcccatta tacgcgcgta taatggacta ttgtgtgctg atatctgtac acttaagggc |
| 121 | tagatcttag cttacgtcac tagagggtcc acgtttagtt tttaagatcc attgatctcc |
| 181 | taaacgctgc aagattcgca acctggtata cttagcctag gcgctaggtc ctagtgcagc |
| 241 | gggacttttt ttctaaagtc gttgagagga ggagtcgtca gaccagatag ctttgatgtc |
| 301 | ctgatcggaa ggatcgttgg cccccctgca ggcagctgtt aattaactgc gcgctcgctc |
| 361 | gctcactgag gccgcccggg caaagcccgg gcgtcgggcg acctttggtc gcccggcctc |
| 421 | agtgagcgag cgagcgcgca gagagggagt ggccaactcc atcactaggg gttccttgta |
| 481 | gttaatgatt aacccgccat gctacttatc tacggcgcgc cacgcgttct aggagttaat |
| 541 | ttttaaaaag cagtcaaaag tccaagtgcc cttgcgagca tttactctct ctgtttgctc |
| 601 | tggttaataa tctcaggagc acaaacattc cttactagtt ctaggagtta atttttaaaa |
| 661 | agcagtcaaa agtccaagtg cccttgcgag catttactct ctctgtttgc tctggttaat |
| 721 | aatctcagga gcacaaacat tccttactag ttctagagcg gccgccagtg tgctggaatt |
| 781 | cggctttttt agggctggaa gctacctttg acatcatttc ctctgcgaat gcatgtataa |
| 841 | tttctacaga acctattaga aaggatcacc cagcctctgc ttttgtacaa ctttccctta |
| 901 | aaaaactgcc aatcccactg ctgtttggcc caatagtgag aactttttcc tgctgcctct |
| 961 | tggtgctttt gcctatggcc cctattctgc ctgctgaaga cactcttgcc agcatggact |
| 1021 | taaacccctc cagctctgac aatcctcttt ctcttttgtt ttacatgaag ggtctggcag |
| 1081 | ccaaagcaat cactcaaagt tcaaacctta tcattttttg ctttgttcct cttggccttg |
| 1141 | gttttgtaca tcagctttga aaataccatc ccagggttaa tgctggggtt aatttataac |
| 1201 | tgagagtgct ctagttctgc aatacaggac atgctataaa aatggaaaga tgttgctttc |
| 1261 | tgagagatca ggtggattct tgggcatttg cttaagcttg gtaccttttt tatgggccat |
| 1321 | atcctcatgt acagaatgca gctgctgtcc tgcattgcac tgtcactggc actggttacc |
| 1381 | aactcacagc agggggccag caggccaggc cccagggatg cccaggccca ccctggcaga |
| 1441 | cccagggctg tgcccaccca gtgtgatgtg cctcccaaca gcagatttga ctgtgcccct |
| 1501 | gataaggcca ttactcagga acagtgtgag gccaggggct gctgctatat ccctgccaag |
| 1561 | cagggcctgc agggggccca gatggggcag ccctggtgct tcttcccccc cagctacccc |
| 1621 | tcttataagc tggagaatct gagcagctct gaaatgggct acactgccac tctgaccagg |
| 1681 | actaccccca ccttcttccc caaggatatt ctgactctga ggctggatgt gatgatggag |
| 1741 | actgagaaca ggctgcactt caccatcaag gaccctgcca acaggaggta tgaggtgccc |
| 1801 | ctggaaactc ccagggtgca ctctagggcc cccagccccc tgtattctgt ggagttctct |
| 1861 | gaggagcctt ttggggtcat tgtccacagg cagctggatg gcagggtgct gctgaatact |
| 1921 | actgtggccc ctctgttctt tgctgaccag ttcctgcagc tgagcaccag cctgccttct |
| 1981 | cagtacatta ctggcctggc tgagcatctg agccccctga tgctgagcac ctcttggacc |
| 2041 | agaatcaccc tgtggaacag ggacctggct cccactcctg gggccaacct gtatggcagc |
| 2101 | caccccttct acctggccct ggaggatggg ggctctgccc atggggtgtt cctgctgaac |
| 2161 | agcaatgcca tggatgtggt gctgcagccc tctcctgccc tgtcttggag atctactggg |
| 2221 | ggcatcctgg atgtgtatat cttcctgggg cctgagccca agtctgtggt gcagcagtac |
| 2281 | ctggatgtgg tgggctaccc cttcatgccc ccctactggg gcctgggctt ccacctgtgc |
| 2341 | aggtggggct actcttctac tgctatcacc aggcaggtgg tggagaacat gaccagggct |
| 2401 | cacttccctc tggatgtgca gtggaatgac ctggactaca tggactctag gagagacttc |
| 2461 | acttttaata aggatgggtt cagggacttt cctgccatgg tgcaggagct gcatcagggg |
| 2521 | ggcaggagat atatgatgat tgtggaccct gctatttcta gctctggccc tgctggcagc |
| 2581 | tataggccct atgatgaggg gctgaggagg ggggtgttca tcactaatga gactggccag |
| 2641 | cccctgattg gcaaggtgtg gcctggctct actgccttcc ctgatttcac caaccccact |
| 2701 | gccctggcct ggtgggagga tatggtggct gagtttcatg accaggtgcc ctttgatggc |
| 2761 | atgtggattg acatgaatga gcccagcaac tttatcaggg gctctgaaga tggctgcccc |
| 2821 | aacaatgagc tggagaaccc cccctatgtg cctggggtgg tggggggcac cctgcaggct |
| 2881 | gccaccatct gtgccagcag ccaccagttc ctgagcaccc actataacct gcacaacctg |
| 2941 | tatggcctga ctgaggccat tgcctctcac agggccctgg tgaaggctag ggggactagg |
| 3001 | ccctttgtga tcagcaggtc tacttttgct ggccatggca ggtatgctgg gcactggact |
| 3061 | ggggatgtgt ggtctagctg ggagcagctg gccagctctg tgcctgagat cctgcagttt |
| 3121 | aatctgctgg gggtgcccct ggtgggggct gatgtgtgtg gcttcctggg caatacctct |
| 3181 | gaggagctgt gtgtgaggtg gactcagctg ggggctttct accccttcat gagaaaccac |
| 3241 | aactctctgc tgagcctgcc ccaggagccc tattcttttt ctgagcctgc ccagcaggct |
| 3301 | atgaggaagg ccctgactct gaggtatgcc ctgctgcccc acctgtatac cctgttccat |
| 3361 | caggcccatg tggctgggga gactgtggcc agacctctgt tcctggagtt ccccaaggat |
| 3421 | agctctactt ggactgtgga ccaccagctg ctgtgggggg aggctctgct gatcacccct |
| 3481 | gtgctgcagg ctgggaaggc tgaggtgact ggctatttcc ccctgggcac ctggtatgat |
| 3541 | ctgcagactg tgcccattga ggccctgggc tctctgcccc ctccccctgc tgcccccagg |
| 3601 | gagcctgcca tccactctga gggccagtgg gtgaccctgc ctgcccctct ggacactatc |
| 3661 | aatgtgcacc tgagggctgg ctacatcatc cccctgcagg gccctggcct gactaccact |
| 3721 | gagtctaggc agcagcccat ggccctggct gtggctctga ccaagggggg ggaggccagg |
| 3781 | ggggagctgt tctgggatga tggggagtct ctggaggtgc tggagagggg ggcctacacc |
| 3841 | caggtgatct tcctggctag gaataacacc attgtcaatg agctggtgag ggtgacctct |
| 3901 | gagggggctg gcctgcagct gcagaaggtg actgtgctgg gggtggctac tgccccccag |
| 3961 | caggtgctga gcaatggggt gcctgtgagc aacttcacct atagccctga caccaaggtg |
| 4021 | ctggacatct gtgtgagcct gctgatgggg gagcagttcc tggtgagctg gtgctaattt |
| 4081 | aaatctcgag ccgggcggag tgtgttagtc tctccagagg gaggctggtt ccccagggaa |
| 4141 | gcagagcctg tgtgcgggca gcagctgtgt gcgggcctgg gggttgttaa gtgcaattat |
| 4201 | ttttaataaa aggggcattt ggaaaaaaaa aaaaaaggta gcagtcgaca gatgaattct |
| 4261 | gcagatctgt ggcttctagc tgcccgggtg gcatccctgt gacccctccc cagtgcctct |
| 4321 | cctggccctg gaagttgcca ctccagtgcc caccagcctt gtcctaataa aattaagttg |
| 4381 | catcattttg tctgactagg tgtccttcta taatattatg gggtggaggg gggtggtatg |
| 4441 | gagcaagggg caagttggga agacaacctg tagggcctgc ggggtctatt gggaaccaag |
| 4501 | ctggagtgca gtggcacaat cttggctcac tgcaatctcc gcctcctggg ttcaagcgat |
| 4561 | tctcctgcct cagcctcccg agttgttggg attccaggca tgcatgacca ggctcagcta |
| 4621 | atttttgttt ttttggtaga gacggggttt caccatattg gccaggctgg tctccaactc |
| 4681 | ctaatctcag gtgatctacc caccttggcc tcccaaattg ctgggattac aggcgtgaac |
| 4741 | cactgctccc ttccctgtcc ttctgatttt aaaaaaaaga gaaatgttct ggcacctgca |
| 4801 | cttgcactgg ggacagccta ttttgctagt ttgttttgtt tcgttttgtt ttgatggaga |
| 4861 | gcgtatgttg tttaaacgcg gccgcgtaga taagtagcat ggcgggttaa tcattaacta |
| 4921 | caaggaaccc ctagtgatgg agttggccac tccctctctg cgcgctcgct cgctcactga |
| 4981 | ggccgggcga ccaaaggtcg cccgacgccc gggctttgcc cgggcggcct cagtgagcga |
| 5041 | gcgagcgcgc agttaattaa ggcgccctag gccgaccctt agactctgta ctcagttcta |
| 5101 | taaacgagcc attggatacg agatccgtag attgataagg gacacggaat atccccggac |
| 5161 | gcaatagaca ccggtggaca gcttggtatc ctgagcacag tcgcgcgtcc gaatctagct |
| 5221 | ctactttaga ggccccggat tctgatggtc gtagaccgca gaaccgattg gggggatgag |
| 5281 | atctactagt tatcagcaca caattgccca ttatacgcgc gtataatgga ctattgtgtg |
| 5341 | ctgatatagg gataacaggg taattctaga gctagcatat ggatccatcg atttgatgcg |
| 5401 | gtattttctc cttacgcatc tgtgcggtat ttcacaccgc atacgtcaaa gcaaccatag |
| 5461 | tacgcgccct gtagcggcgc attaagcgcg gcgggtgtgg tggttacgcg cagcgtgacc |
| 5521 | gctacacttg ccagcgccct agcgcccgct cctttcgctt tcttcccttc ctttctcgcc |
| 5581 | acgttcgccg gctttccccg tcaagctcta aatcgggggc tccctttagg gttccgattt |
| 5641 | agtgctttac ggcacctcga ccccaaaaaa cttgatttgg gtgatggttc acgtagtggg |
| 5701 | ccatcgccct gatagacggt ttttcgccct ttgacgttgg agtccacgtt ctttaatagt |
| 5761 | ggactcttgt tccaaactgg aacaacactc aactctatct cgggctattc ttttgattta |
| 5821 | taagggattt tgccgatttc ggtctattgg ttaaaaaatg agctgattta acaaaaattt |
| 5881 | aacgcgaatt ttaacaaaat attaacgttt acaattttat ggtgcactct cagtacaatc |
| 5941 | tgctctgatg ccgcatagtt aagccagccc cgacacccgc caacacccgc tgacgcgccc |
| 6001 | tgacgggctt gtctgctccc ggcatccgct tacagacaag ctgtgaccgt ctccgggagc |
| 6061 | tgcatgtgtc agaggttttc accgtcatca ccgaaacgcg cgagacgaaa gggcctcgtg |
| 6121 | atacgcctat ttttataggt taatgtcatg ataataatgg tttcttagac gtcaggtggc |
| 6181 | acttttcggg gaaatgtgcg cggaacccct atttgtttat ttttctaaat acattcaaat |
| 6241 | atgtatccgc tcatgagaca ataaccctga taaatgcttc aataatattg aaaaaggaag |
| 6301 | agtatgagcc atattcaacg ggaaacgtcg aggccgcgat taaattccaa catggatgct |
| 6361 | gatttatatg ggtataaatg ggctcgcgat aatgtcgggc aatcaggtgc gacaatctat |
| 6421 | cgcttgtatg ggaagcccga tgcgccagag ttgtttctga aacatggcaa aggtagcgtt |
| 6481 | gccaatgatg ttacagatga gatggtcaga ctaaactggc tgacggaatt tatgcctctt |
| 6541 | ccgaccatca agcattttat ccgtactcct gatgatgcat ggttactcac cactgcgatc |
| 6601 | cccggaaaaa cagcattcca ggtattagaa gaatatcctg attcaggtga aaatattgtt |
| 6661 | gatgcgctgg cagtgttcct gcgccggttg cattcgattc ctgtttgtaa ttgtcctttt |
| 6721 | aacagcgatc gcgtatttcg tctcgctcag gcgcaatcac gaatgaataa cggtttggtt |
| 6781 | gatgcgagtg attttgatga cgagcgtaat ggctggcctg ttgaacaagt ctggaaagaa |
| 6841 | atgcataaac ttttgccatt ctcaccggat tcagtcgtca ctcatggtga tttctcactt |
| 6901 | gataacctta tttttgacga ggggaaatta ataggttgta ttgatgttgg acgagtcgga |
| 6961 | atcgcagacc gataccagga tcttgccatc ctatggaact gcctcggtga gttttctcct |
| 7021 | tcattacaga aacggctttt tcaaaaatat ggtattgata atcctgatat gaataaattg |
| 7081 | cagtttcatt tgatgctcga tgagtttttc taagcgtata atggtctaga gctagcatat |
| 7141 | ggatccatcg attccattat acgcctgtca gaccaagttt actcatatat actttagatt |
| 7201 | gatttaaaac ttcattttta atttaaaagg atctaggtga agatcctttt tgataatctc |
| 7261 | atgaccaaaa tcccttaacg tgagttttcg ttccactgag cgtcagaccc cgtagaaaag |
| 7321 | atcaaaggat cttcttgaga tccttttttt ctgcgcgtaa tctgctgctt gcaaacaaaa |
| 7381 | aaaccaccgc taccagcggt ggtttgtttg ccggatcaag agctaccaac tctttttccg |
| 7441 | aaggtaactg gcttcagcag agcgcagata ccaaatactg ttcttctagt gtagccgtag |
| 7501 | ttaggccacc acttcaagaa ctctgtagca ccgcctacat acctcgctct gctaatcctg |
| 7561 | ttaccagtgg ctgctgccag tggcgataag tcgtgtctta ccgggttgga ctcaagacga |
| 7621 | tagttaccgg ataaggcgca gcggtcgggc tgaacggggg gttcgtgcac acagcccagc |
| 7681 | ttggagcgaa cgacctacac cgaactgaga tacctacagc gtgagctatg agaaagcgcc |
| 7741 | acgcttcccg aagggagaaa ggcggacagg tatccggtaa gcggcagggt cggaacagga |
| 7801 | gagcgcacga gggagcttcc agggggaaac gcctggtatc tttatagtcc tgtcgggttt |
| 7861 | cgccacctct gacttgagcg tcgatttttg tgatgctcgt caggggggcg gagcctatgg |
| 7921 | aaaaacgcca gcaacgcggc ctttttacgg ttcctggcct tttgctggcc ttttgctcac |
| 7981 | atgt |

| pP068_seq100-201Ig_2-27 and 23-56 deletion (SEQ ID NO: 473) | |
|---|---|
| (SEQ ID NO: 473) | |
| 1 | tctagagcta gcatatggat ccatcgattt agggataaca gggtaattat cagcacacaa |
| 61 | ttgcccatta tacgcgcgta taatggacta ttgtgtgctg atatctgtac acttaagggc |
| 121 | tagatcttag cttacgtcac tagagggtcc acgtttagtt tttaagatcc attgatctcc |
| 181 | taaacgctgc aagattcgca acctggtata cttagcctag gcgctaggtc ctagtgcagc |
| 241 | gggacttttt ttctaaagtc gttgagagga ggagtcgtca gaccagatag ctttgatgtc |
| 301 | ctgatcggaa ggatcgttgg cccccctgca ggcagctgtt aattaactgc gcgctcgctc |
| 361 | gctcactgag gccgcccggg caaagcccgg gcgtcgggcg acctttggtc gcccggcctc |
| 421 | agtgagcgag cgagcgcgca gagagggagt ggccaactcc atcactaggg gttccttgta |
| 481 | gttaatgatt aacccgccat gctacttatc tacggcgcgc cacgcgttct aggagttaat |
| 541 | ttttaaaaag cagtcaaaag tccaagtgcc cttgcgagca tttactctct ctgtttgctc |
| 601 | tggttaataa tctcaggagc acaaacattc cttactagtt ctaggagtta atttttaaaa |
| 661 | agcagtcaaa agtccaagtg cccttgcgag catttactct ctctgtttgc tctggttaat |
| 721 | aatctcagga gcacaaacat tccttactag ttctagagcg gccgccagtg tgctggaatt |
| 781 | cggctttttt agggctggaa gctacctttg acatcatttc ctctgcgaat gcatgtataa |
| 841 | tttctacaga acctattaga aaggatcacc cagcctctgc ttttgtacaa ctttccctta |
| 901 | aaaaactgcc aatcccactg ctgtttggcc caatagtgag aactttttcc tgctgcctct |
| 961 | tggtgctttt gcctatggcc cctattctgc ctgctgaaga cactcttgcc agcatggact |
| 1021 | taaacccctc cagctctgac aatcctcttt ctcttttgtt ttacatgaag ggtctggcag |
| 1081 | ccaaagcaat cactcaaagt tcaaacctta tcattttttg ctttgttcct cttggccttg |
| 1141 | gttttgtaca tcagctttga aaataccatc ccagggttaa tgctggggtt aatttataac |
| 1201 | tgagagtgct ctagttctgc aatacaggac atgctataaa aatggaaaga tgttgctttc |
| 1261 | tgagagatca ggtggattct tgggcatttg cttaagcttg gtaccttttt tatgggccat |
| 1321 | atcctcatgg agtttgggct gagctgggtc tttctggtgg ccctgctgaa gggagtccag |
| 1381 | tgtgagcagc agggggccag caggccaggc cccagggatg cccaggccca ccctggcaga |
| 1441 | cccagggctg tgcccaccca gtgtgatgtg cctcccaaca gcagatttga ctgtgcccct |
| 1501 | gataaggcca ttactcagga acagtgtgag gccaggggct gctgctatat ccctgccaag |
| 1561 | cagggcctgc agggggccca gatggggcag ccctggtgct tcttcccccc cagctacccc |
| 1621 | tcttataagc tggagaatct gagcagctct gaaatgggct acactgccac tctgaccagg |
| 1681 | actaccccca ccttcttccc caaggatatt ctgactctga ggctggatgt gatgatggag |
| 1741 | actgagaaca ggctgcactt caccatcaag gaccctgcca acaggaggta tgaggtgccc |
| 1801 | ctggaaactc ccagggtgca ctctagggcc cccagccccc tgtattctgt ggagttctct |
| 1861 | gaggagcctt ttggggtcat tgtccacagg cagctggatg gcagggtgct gctgaatact |
| 1921 | actgtggccc ctctgttctt tgctgaccag ttcctgcagc tgagcaccag cctgccttct |
| 1981 | cagtacatta ctggcctggc tgagcatctg agccccctga tgctgagcac ctcttggacc |
| 2041 | agaatcaccc tgtggaacag ggacctggct cccactcctg gggccaacct gtatggcagc |
| 2101 | caccccttct acctggccct ggaggatggg ggctctgccc atggggtgtt cctgctgaac |
| 2161 | agcaatgcca tggatgtggt gctgcagccc tctcctgccc tgtcttggag atctactggg |
| 2221 | ggcatcctgg atgtgtatat cttcctgggg cctgagccca agtctgtggt gcagcagtac |
| 2281 | ctggatgtgg tgggctaccc cttcatgccc ccctactggg gcctgggctt ccacctgtgc |
| 2341 | aggtggggct actcttctac tgctatcacc aggcaggtgg tggagaacat gaccagggct |
| 2401 | cacttccctc tggatgtgca gtggaatgac ctggactaca tggactctag gagagacttc |
| 2461 | acttttaata aggatgggtt cagggacttt cctgccatgg tgcaggagct gcatcagggg |
| 2521 | ggcaggagat atatgatgat tgtggaccct gctatttcta gctctggccc tgctggcagc |
| 2581 | tataggccct atgatgaggg gctgaggagg ggggtgttca tcactaatga gactggccag |
| 2641 | cccctgattg gcaaggtgtg gcctggctct actgccttcc ctgatttcac caaccccact |
| 2701 | gccctggcct ggtgggagga tatggtggct gagtttcatg accaggtgcc ctttgatggc |
| 2761 | atgtggattg acatgaatga gcccagcaac tttatcaggg gctctgaaga tggctgcccc |
| 2821 | aacaatgagc tggagaaccc cccctatgtg cctggggtgg tggggggcac cctgcaggct |
| 2881 | gccaccatct gtgccagcag ccaccagttc ctgagcaccc actataacct gcacaacctg |
| 2941 | tatggcctga ctgaggccat tgcctctcac agggccctgg tgaaggctag ggggactagg |
| 3001 | ccctttgtga tcagcaggtc tacttttgct ggccatggca ggtatgctgg gcactggact |
| 3061 | ggggatgtgt ggtctagctg ggagcagctg gccagctctg tgcctgagat cctgcagttt |
| 3121 | aatctgctgg gggtgcccct ggtgggggct gatgtgtgtg gcttcctggg caatacctct |
| 3181 | gaggagctgt gtgtgaggtg gactcagctg ggggctttct accccttcat gagaaaccac |
| 3241 | aactctctgc tgagcctgcc ccaggagccc tattcttttt ctgagcctgc ccagcaggct |
| 3301 | atgaggaagg ccctgactct gaggtatgcc ctgctgcccc acctgtatac cctgttccat |
| 3361 | caggcccatg tggctgggga gactgtggcc agacctctgt tcctggagtt ccccaaggat |
| 3421 | agctctactt ggactgtgga ccaccagctg ctgtgggggg aggctctgct gatcacccct |
| 3481 | gtgctgcagg ctgggaaggc tgaggtgact ggctatttcc ccctgggcac ctggtatgat |
| 3541 | ctgcagactg tgcccattga ggccctgggc tctctgcccc ctccccctgc tgcccccagg |
| 3601 | gagcctgcca tccactctga gggccagtgg gtgaccctgc ctgcccctct ggacactatc |
| 3661 | aatgtgcacc tgagggctgg ctacatcatc cccctgcagg gccctggcct gactaccact |
| 3721 | gagtctaggc agcagcccat ggccctggct gtggctctga ccaagggggg ggaggccagg |
| 3781 | ggggagctgt tctgggatga tggggagtct ctggaggtgc tggagagggg ggcctacacc |
| 3841 | caggtgatct tcctggctag gaataacacc attgtcaatg agctggtgag ggtgacctct |
| 3901 | gagggggctg gcctgcagct gcagaaggtg actgtgctgg gggtggctac tgccccccag |
| 3961 | caggtgctga gcaatggggt gcctgtgagc aacttcacct atagccctga caccaaggtg |
| 4021 | ctggacatct gtgtgagcct gctgatgggg gagcagttcc tggtgagctg gtgctaattt |
| 4081 | aaatctcgag ccgggcggag tgtgttagtc tctccagagg gaggctggtt ccccagggaa |
| 4141 | gcagagcctg tgtgcgggca gcagctgtgt gcgggcctgg gggttgttaa gtgcaattat |
| 4201 | ttttaataaa aggggcattt ggaaaaaaaa aaaaaaggta gcagtcgaca gatgaattct |
| 4261 | gcagatctgt ggcttctagc tgcccgggtg gcatccctgt gacccctccc cagtgcctct |
| 4321 | cctggccctg gaagttgcca ctccagtgcc caccagcctt gtcctaataa aattaagttg |
| 4381 | catcattttg tctgactagg tgtccttcta taatattatg gggtggaggg gggtggtatg |
| 4441 | gagcaagggg caagttggga agacaacctg tagggcctgc ggggtctatt gggaaccaag |
| 4501 | ctggagtgca gtggcacaat cttggctcac tgcaatctcc gcctcctggg ttcaagcgat |
| 4561 | tctcctgcct cagcctcccg agttgttggg attccaggca tgcatgacca ggctcagcta |
| 4621 | atttttgttt ttttggtaga gacggggttt caccatattg gccaggctgg tctccaactc |
| 4681 | ctaatctcag gtgatctacc caccttggcc tcccaaattg ctgggattac aggcgtgaac |
| 4741 | cactgctccc ttccctgtcc ttctgatttt aaaaaaaaga gaaatgttct ggcacctgca |
| 4801 | cttgcactgg ggacagccta ttttgctagt ttgttttgtt tcgttttgtt ttgatggaga |
| 4861 | gcgtatgttg tttaaacgcg gccgcgtaga taagtagcat ggcgggttaa tcattaacta |
| 4921 | caaggaaccc ctagtgatgg agttggccac tccctctctg cgcgctcgct cgctcactga |
| 4981 | ggccgggcga ccaaaggtcg cccgacgccc gggctttgcc cgggcggcct cagtgagcga |
| 5041 | gcgagcgcgc agttaattaa ggcgccctag gccgaccctt agactctgta ctcagttcta |
| 5101 | taaacgagcc attggatacg agatccgtag attgataagg gacacggaat atccccggac |
| 5161 | gcaatagaca ccggtggaca gcttggtatc ctgagcacag tcgcgcgtcc gaatctagct |
| 5221 | ctactttaga ggccccggat tctgatggtc gtagaccgca gaaccgattg gggggatgag |
| 5281 | atctactagt tatcagcaca caattgccca ttatacgcgc gtataatgga ctattgtgtg |
| 5341 | ctgatatagg gataacaggg taattctaga gctagcatat ggatccatcg atttgatgcg |
| 5401 | gtattttctc cttacgcatc tgtgcggtat ttcacaccgc atacgtcaaa gcaaccatag |
| 5461 | tacgcgccct gtagcggcgc attaagcgcg gcgggtgtgg tggttacgcg cagcgtgacc |
| 5521 | gctacacttg ccagcgccct agcgcccgct cctttcgctt tcttcccttc ctttctcgcc |
| 5581 | acgttcgccg gctttccccg tcaagctcta aatcgggggc tccctttagg gttccgattt |
| 5641 | agtgctttac ggcacctcga ccccaaaaaa cttgatttgg gtgatggttc acgtagtggg |
| 5701 | ccatcgccct gatagacggt ttttcgccct ttgacgttgg agtccacgtt ctttaatagt |
| 5761 | ggactcttgt tccaaactgg aacaacactc aactctatct cgggctattc ttttgattta |
| 5821 | taagggattt tgccgatttc ggtctattgg ttaaaaaatg agctgattta acaaaaattt |
| 5881 | aacgcgaatt ttaacaaaat attaacgttt acaattttat ggtgcactct cagtacaatc |
| 5941 | tgctctgatg ccgcatagtt aagccagccc cgacacccgc caacacccgc tgacgcgccc |
| 6001 | tgacgggctt gtctgctccc ggcatccgct tacagacaag ctgtgaccgt ctccgggagc |
| 6061 | tgcatgtgtc agaggttttc accgtcatca ccgaaacgcg cgagacgaaa gggcctcgtg |
| 6121 | atacgcctat ttttataggt taatgtcatg ataataatgg tttcttagac gtcaggtggc |
| 6181 | acttttcggg gaaatgtgcg cggaacccct atttgtttat ttttctaaat acattcaaat |
| 6241 | atgtatccgc tcatgagaca ataaccctga taaatgcttc aataatattg aaaaaggaag |
| 6301 | agtatgagcc atattcaacg ggaaacgtcg aggccgcgat taaattccaa catggatgct |
| 6361 | gatttatatg ggtataaatg ggctcgcgat aatgtcgggc aatcaggtgc gacaatctat |
| 6421 | cgcttgtatg ggaagcccga tgcgccagag ttgtttctga aacatggcaa aggtagcgtt |
| 6481 | gccaatgatg ttacagatga gatggtcaga ctaaactggc tgacggaatt tatgcctctt |
| 6541 | ccgaccatca agcattttat ccgtactcct gatgatgcat ggttactcac cactgcgatc |
| 6601 | cccggaaaaa cagcattcca ggtattagaa gaatatcctg attcaggtga aaatattgtt |
| 6661 | gatgcgctgg cagtgttcct gcgccggttg cattcgattc ctgtttgtaa ttgtcctttt |
| 6721 | aacagcgatc gcgtatttcg tctcgctcag gcgcaatcac gaatgaataa cggtttggtt |
| 6781 | gatgcgagtg attttgatga cgagcgtaat ggctggcctg ttgaacaagt ctggaaagaa |
| 6841 | atgcataaac ttttgccatt ctcaccggat tcagtcgtca ctcatggtga tttctcactt |
| 6901 | gataacctta tttttgacga ggggaaatta ataggttgta ttgatgttgg acgagtcgga |
| 6961 | atcgcagacc gataccagga tcttgccatc ctatggaact gcctcggtga gttttctcct |
| 7021 | tcattacaga aacggctttt tcaaaaatat ggtattgata atcctgatat gaataaattg |
| 7081 | cagtttcatt tgatgctcga tgagtttttc taagcgtata atggtctaga gctagcatat |
| 7141 | ggatccatcg attccattat acgcctgtca gaccaagttt actcatatat actttagatt |
| 7201 | gatttaaaac ttcattttta atttaaaagg atctaggtga agatcctttt tgataatctc |
| 7261 | atgaccaaaa tcccttaacg tgagttttcg ttccactgag cgtcagaccc cgtagaaaag |
| 7321 | atcaaaggat cttcttgaga tccttttttt ctgcgcgtaa tctgctgctt gcaaacaaaa |
| 7381 | aaaccaccgc taccagcggt ggtttgtttg ccggatcaag agctaccaac tctttttccg |
| 7441 | aaggtaactg gcttcagcag agcgcagata ccaaatactg ttcttctagt gtagccgtag |
| 7501 | ttaggccacc acttcaagaa ctctgtagca ccgcctacat acctcgctct gctaatcctg |
| 7561 | ttaccagtgg ctgctgccag tggcgataag tcgtgtctta ccgggttgga ctcaagacga |
| 7621 | tagttaccgg ataaggcgca gcggtcgggc tgaacggggg gttcgtgcac acagcccagc |
| 7681 | ttggagcgaa cgacctacac cgaactgaga tacctacagc gtgagctatg agaaagcgcc |
| 7741 | acgcttcccg aagggagaaa ggcggacagg tatccggtaa gcggcagggt cggaacagga |
| 7801 | gagcgcacga gggagcttcc agggggaaac gcctggtatc tttatagtcc tgtcgggttt |
| 7861 | cgccacctct gacttgagcg tcgatttttg tgatgctcgt caggggggcg gagcctatgg |
| 7921 | aaaaacgcca gcaacgcggc ctttttacgg ttcctggcct tttgctggcc ttttgctcac |
| 7981 | atgt |

| pP069_seq3-IL2wt 2-27 and 32-56 deletion | |
|---|---|
| (SEQ ID NO: 474) | |
| 1 | tctagagcta gcatatggat ccatcgattt agggataaca gggtaattat cagcacacaa |
| 61 | ttgcccatta tacgcgcgta taatggacta ttgtgtgctg atatctgtac acttaagggc |
| 121 | tagatcttag cttacgtcac tagagggtcc acgtttagtt tttaagatcc attgatctcc |
| 181 | taaacgctgc aagattcgca acctggtata cttagcctag gcgctaggtc ctagtgcagc |
| 241 | gggacttttt ttctaaagtc gttgagagga ggagtcgtca gaccagatag ctttgatgtc |
| 301 | ctgatcggaa ggatcgttgg cccccctgca ggcagctgtt aattaactgc gcgctcgctc |
| 361 | gctcactgag gccgcccggg caaagcccgg gcgtcgggcg acctttggtc gcccggcctc |
| 421 | agtgagcgag cgagcgcgca gagagggagt ggccaactcc atcactaggg gttccttgta |
| 481 | gttaatgatt aacccgccat gctacttatc tacggcgcgc cacgcgttct aggagttaat |
| 541 | ttttaaaaag cagtcaaaag tccaagtgcc cttgcgagca tttactctct ctgtttgctc |
| 601 | tggttaataa tctcaggagc acaaacattc cttactagtt ctaggagtta atttttaaaa |
| 661 | agcagtcaaa agtccaagtg cccttgcgag catttactct ctctgtttgc tctggttaat |
| 721 | aatctcagga gcacaaacat tccttactag ttctagagcg gccgccagtg tgctggaatt |
| 781 | cggctttttt agggctggaa gctacctttg acatcatttc ctctgcgaat gcatgtataa |
| 841 | tttctacaga acctattaga aaggatcacc cagcctctgc ttttgtacaa ctttccctta |
| 901 | aaaaactgcc aatcccactg ctgtttggcc caatagtgag aactttttcc tgctgcctct |
| 961 | tggtgctttt gcctatggcc cctattctgc ctgctgaaga cactcttgcc agcatggact |
| 1021 | taaacccctc cagctctgac aatcctcttt ctcttttgtt ttacatgaag ggtctggcag |
| 1081 | ccaaagcaat cactcaaagt tcaaacctta tcattttttg ctttgttcct cttggccttg |
| 1141 | gttttgtaca tcagctttga aaataccatc ccagggttaa tgctggggtt aatttataac |
| 1201 | tgagagtgct ctagttctgc aatacaggac atgctataaa aatggaaaga tgttgctttc |
| 1261 | tgagagatca ggtggattct tgggcatttg cttaagcttg gtaccttttt tatgggacat |
| 1321 | attctcatgt acagaatgca gctgctgtcc tgcattgcac tgtcactggc actggttacc |
| 1381 | aactcacagc agggagcttc tagacctgga cctagagatg ctcaggctca tcctggaaga |
| 1441 | cctagagctg tgcctacaca gtgtgatgtg cctcctaatt ctagatttga ttgtgctcct |
| 1501 | gataaggcta taacacagga gcagtgtgag gctagaggat gttgttatat tcctgctaag |
| 1561 | cagggactgc agggagctca gatgggacag ccttggtgtt tttttcctcc ttcttatcct |
| 1621 | tcttataagc tggagaatct gtcttcttct gagatgggat atacagctac actgacaaga |
| 1681 | acaacaccta cattttttcc taaggatatt ctgacactga gactggatgt gatgatggag |
| 1741 | acagagaata gactgcattt tacaattaag gatcctgcta atagaagata tgaggtgcct |
| 1801 | ctagagacac ctagagtgca ttctagagct ccttctcctc tgtattctgt ggagttttct |
| 1861 | gaggagcctt ttggagtgat tgtgcataga cagctggatg gaagagtgct gctgaataca |
| 1921 | acagtggctc ctctgttttt tgctgatcag tttctgcagc tgtctacatc tctgccttct |
| 1981 | cagtatatta caggactggc tgagcatctg tctcctctga tgctgtctac atcttggaca |
| 2041 | agaattacac tgtggaatag agatctggct cctacacctg gagctaatct gtatggatct |
| 2101 | catccttttt atctggctct ggaggatgga ggatctgctc atggagtgtt tctgctgaat |
| 2161 | tctaatgcta tggatgtagt gctgcagcct tctcctgctc tgtcttggag atctacagga |
| 2221 | ggaattctgg atgtgtatat ttttctagga cctgagccta agtctgtggt gcagcagtat |
| 2281 | ctggatgtag tgggatatcc ttttatgcct ccttattggg gactgggatt tcatctgtgt |
| 2341 | agatggggat attcttctac agctattaca agacaggtgg ttgagaatat gacaagagct |
| 2401 | cattttcctc tggatgtgca gtggaatgat ctagattata tggattctag aagagatttt |
| 2461 | acatttaata aggatggatt tagagatttt cctgctatgg tgcaggagct gcatcaggga |
| 2521 | ggaagaagat atatgatgat tgtggatcct gctatttctt cttctggacc tgctggatct |
| 2581 | tatagacctt atgatgaggg actgagaaga ggagtgttta ttacaaatga gacaggacag |
| 2641 | cctctgattg gaaaggtgtg gcctggatct acagcttttc ctgattttac aaatcctaca |
| 2701 | gctctggctt ggtgggagga tatggtggct gagtttcatg atcaggtgcc ttttgatgga |
| 2761 | atgtggattg atatgaatga gccttctaat tttataagag gatctgagga tggatgtcct |
| 2821 | aataatgagc tagagaatcc tccttatgtg cctggagtag tgggaggaac actgcaggct |
| 2881 | gctacaattt gtgcttcttc tcatcagttt ctgtctacac attataatct gcataatctg |
| 2941 | tatggactga cagaggctat tgcttctcat agagctctgg tgaaggctag aggaacaaga |
| 3001 | ccttttgtga tttctagatc tacatttgct ggacatggaa gatatgctgg acattggaca |
| 3061 | ggagatgtat ggtcttcttg ggagcagcta gcttcttctg tgcctgagat tctgcagttt |
| 3121 | aatctgctag gagtgcctct ggtgggagct gatgtgtgtg gatttctggg aaatacatct |
| 3181 | gaggagctgt gtgtgagatg gacacagctg ggagcttttt atccttttat gagaaatcat |
| 3241 | aattctctgc tgtctctgcc tcaggagcct tattcttttt ctgagcctgc tcagcaggct |
| 3301 | atgagaaagg ctctgacact gagatatgct ctgctgcctc atctgtatac actgtttcat |
| 3361 | caggctcatg tggctggaga gacagtagct agacctctgt ttctggagtt tcctaaggat |
| 3421 | tcttctacat ggacagttga tcatcagctg ctgtggggag aggctctgct gattacacct |
| 3481 | gtgctgcagg ctggaaaggc tgaggtgaca ggatattttc ctctgggaac atggtatgat |
| 3541 | ctgcagacag tgcctataga ggctctggga tctctgcctc ctcctcctgc tgctcctaga |
| 3601 | gagcctgcta ttcattctga gggacagtgg gtgacactgc ctgctcctct ggatacaatt |
| 3661 | aatgtgcatc tgagagctgg atatattatt cctctgcagg gacctggact gacaacaaca |
| 3721 | gagtctagac agcagcctat ggctctggct gtggctctga caaagggagg agaggctaga |
| 3781 | ggagagctgt tttgggatga tggagagtct ctggaggtgc tggagagagg agcttataca |
| 3841 | caggtgattt ttctggctag aaataataca attgtgaatg agctggtgag agtgacatct |
| 3901 | gagggagctg gactgcagct gcagaaggtg acagtgctgg gagtggctac agctcctcag |
| 3961 | caggtgctgt ctaatggagt gcctgtgtct aattttacat attctcctga tacaaaggtg |
| 4021 | ctggatattt gtgtgtctct gctgatggga gagcagtttc tggtgtcttg gtgttaatga |
| 4081 | tttaaatctc gagccgggcg gagtgtgtta gtctctccag agggaggctg gttccccagg |
| 4141 | gaagcagagc ctgtgtgcgg gcagcagctg tgtgcgggcc tgggggttgt taagtgcaat |
| 4201 | tatttttaat aaaaggggca tttggaaaaa aaaaaaaaag gtagcagtcg acagatgaat |
| 4261 | tctgcagatc tgtggcttct agctgcccgg gtggcatccc tgtgacccct ccccagtgcc |
| 4321 | tctcctggcc ctggaagttg ccactccagt gcccaccagc cttgtcctaa taaaattaag |
| 4381 | ttgcatcatt ttgtctgact aggtgtcctt ctataatatt atggggtgga ggggggtggt |
| 4441 | atggagcaag gggcaagttg ggaagacaac ctgtagggcc tgcggggtct attgggaacc |
| 4501 | aagctggagt gcagtggcac aatcttggct cactgcaatc tccgcctcct gggttcaagc |
| 4561 | gattctcctg cctcagcctc ccgagttgtt gggattccag gcatgcatga ccaggctcag |
| 4621 | ctaatttttg tttttttggt agagacgggg tttcaccata ttggccaggc tggtctccaa |
| 4681 | ctcctaatct caggtgatct acccaccttg gcctcccaaa ttgctgggat tacaggcgtg |
| 4741 | aaccactgct cccttccctg tccttctgat tttaaaaaaa agagaaatgt tctggcacct |
| 4801 | gcacttgcac tggggacagc ctattttgct agtttgtttt gtttcgtttt gttttgatgg |
| 4861 | agagcgtatg ttgtttaaac gcggccgcgt agataagtag catggcgggt taatcattaa |
| 4921 | ctacaaggaa cccctagtga tggagttggc cactccctct ctgcgcgctc gctcgctcac |
| 4981 | tgaggccggg cgaccaaagg tcgcccgacg cccgggcttt gcccgggcgg cctcagtgag |
| 5041 | cgagcgagcg cgcagttaat taaggcgccc taggccgacc cttagactct gtactcagtt |
| 5101 | ctataaacga gccattggat acgagatccg tagattgata agggacacgg aatatccccg |
| 5161 | gacgcaatag acaccggtgg acagcttggt atcctgagca cagtcgcgcg tccgaatcta |
| 5221 | gctctacttt agaggccccg gattctgatg gtcgtagacc gcagaaccga ttggggggat |
| 5281 | gagatctact agttatcagc acacaattgc ccattatacg cgcgtataat ggactattgt |
| 5341 | gtgctgatat agggataaca gggtaattct agagctagca tatggatcca tcgatttgat |
| 5401 | gcggtatttt ctccttacgc atctgtgcgg tatttcacac cgcatacgtc aaagcaacca |
| 5461 | tagtacgcgc cctgtagcgg cgcattaagc gcggcgggtg tggtggttac gcgcagcgtg |
| 5521 | accgctacac ttgccagcgc cctagcgccc gctcctttcg ctttcttccc ttcctttctc |
| 5581 | gccacgttcg ccggctttcc ccgtcaagct ctaaatcggg ggctcccttt agggttccga |
| 5641 | tttagtgctt tacggcacct cgaccccaaa aaacttgatt tgggtgatgg ttcacgtagt |
| 5701 | gggccatcgc cctgatagac ggtttttcgc cctttgacgt tggagtccac gttctttaat |
| 5761 | agtggactct tgttccaaac tggaacaaca ctcaactcta tctcgggcta ttcttttgat |
| 5821 | ttataaggga ttttgccgat ttcggtctat tggttaaaaa atgagctgat ttaacaaaaa |
| 5881 | tttaacgcga attttaacaa aatattaacg tttacaattt tatggtgcac tctcagtaca |
| 5941 | atctgctctg atgccgcata gttaagccag ccccgacacc cgccaacacc cgctgacgcg |
| 6001 | ccctgacggg cttgtctgct cccggcatcc gcttacagac aagctgtgac cgtctccggg |
| 6061 | agctgcatgt gtcagaggtt ttcaccgtca tcaccgaaac gcgcgagacg aaagggcctc |
| 6121 | gtgatacgcc tatttttata ggttaatgtc atgataataa tggtttctta gacgtcaggt |
| 6181 | ggcacttttc ggggaaatgt gcgcggaacc cctatttgtt tatttttcta aatacattca |
| 6241 | aatatgtatc cgctcatgag acaataaccc tgataaatgc ttcaataata ttgaaaaagg |
| 6301 | aagagtatga gccatattca acgggaaacg tcgaggccgc gattaaattc caacatggat |
| 6361 | gctgatttat atgggtataa atgggctcgc gataatgtcg ggcaatcagg tgcgacaatc |
| 6421 | tatcgcttgt atgggaagcc cgatgcgcca gagttgtttc tgaaacatgg caaaggtagc |
| 6481 | gttgccaatg atgttacaga tgagatggtc agactaaact ggctgacgga atttatgcct |
| 6541 | cttccgacca tcaagcattt tatccgtact cctgatgatg catggttact caccactgcg |
| 6601 | atccccggaa aaacagcatt ccaggtatta gaagaatatc ctgattcagg tgaaaatatt |
| 6661 | gttgatgcgc tggcagtgtt cctgcgccgg ttgcattcga ttcctgtttg taattgtcct |
| 6721 | tttaacagcg atcgcgtatt tcgtctcgct caggcgcaat cacgaatgaa taacggtttg |
| 6781 | gttgatgcga gtgattttga tgacgagcgt aatggctggc ctgttgaaca agtctggaaa |
| 6841 | gaaatgcata aacttttgcc attctcaccg gattcagtcg tcactcatgg tgatttctca |
| 6901 | cttgataacc ttatttttga cgaggggaaa ttaataggtt gtattgatgt tggacgagtc |
| 6961 | ggaatcgcag accgatacca ggatcttgcc atcctatgga actgcctcgg tgagttttct |
| 7021 | ccttcattac agaaacggct ttttcaaaaa tatggtattg ataatcctga tatgaataaa |
| 7081 | ttgcagtttc atttgatgct cgatgagttt ttctaagcgt ataatggtct agagctagca |
| 7141 | tatggatcca tcgattccat tatacgcctg tcagaccaag tttactcata tatactttag |
| 7201 | attgatttaa aacttcattt ttaatttaaa aggatctagg tgaagatcct ttttgataat |
| 7261 | ctcatgacca aaatccctta acgtgagttt tcgttccact gagcgtcaga ccccgtagaa |
| 7321 | aagatcaaag gatcttcttg agatcctttt tttctgcgcg taatctgctg cttgcaaaca |
| 7381 | aaaaaaccac cgctaccagc ggtggtttgt ttgccggatc aagagctacc aactcttttt |
| 7441 | ccgaaggtaa ctggcttcag cagagcgcag ataccaaata ctgttcttct agtgtagccg |
| 7501 | tagttaggcc accacttcaa gaactctgta gcaccgccta catacctcgc tctgctaatc |
| 7561 | ctgttaccag tggctgctgc cagtggcgat aagtcgtgtc ttaccgggtt ggactcaaga |
| 7621 | cgatagttac cggataaggc gcagcggtcg ggctgaacgg ggggttcgtg cacacagccc |
| 7681 | agcttggagc gaacgaccta caccgaactg agatacctac agcgtgagct atgagaaagc |
| 7741 | gccacgcttc ccgaagggag aaaggcggac aggtatccgg taagcggcag ggtcggaaca |
| 7801 | ggagagcgca cgagggagct tccaggggga aacgcctggt atctttatag tcctgtcggg |
| 7861 | tttcgccacc tctgacttga gcgtcgattt ttgtgatgct cgtcaggggg gcggagccta |
| 7921 | tggaaaaacg ccagcaacgc ggccttttta cggttcctgg ccttttgctg gccttttgct |
| 7981 | cacatgt |

| pP070_seq3-201Ig_2-27 and 32-56 deletion (SEQ ID NO: 475) | |
|---|---|
| (SEQ ID NO: 475) | |
| 1 | tctagagcta gcatatggat ccatcgattt agggataaca gggtaattat cagcacacaa |
| 61 | ttgcccatta tacgcgcgta taatggacta ttgtgtgctg atatctgtac acttaagggc |
| 121 | tagatcttag cttacgtcac tagagggtcc acgtttagtt tttaagatcc attgatctcc |
| 181 | taaacgctgc aagattcgca acctggtata cttagcctag gcgctaggtc ctagtgcagc |
| 241 | gggacttttt ttctaaagtc gttgagagga ggagtcgtca gaccagatag ctttgatgtc |
| 301 | ctgatcggaa ggatcgttgg cccccctgca ggcagctgtt aattaactgc gcgctcgctc |
| 361 | gctcactgag gccgcccggg caaagcccgg gcgtcgggcg acctttggtc gcccggcctc |
| 421 | agtgagcgag cgagcgcgca gagagggagt ggccaactcc atcactaggg gttccttgta |
| 481 | gttaatgatt aacccgccat gctacttatc tacggcgcgc cacgcgttct aggagttaat |
| 541 | ttttaaaaag cagtcaaaag tccaagtgcc cttgcgagca tttactctct ctgtttgctc |
| 601 | tggttaataa tctcaggagc acaaacattc cttactagtt ctaggagtta atttttaaaa |
| 661 | agcagtcaaa agtccaagtg cccttgcgag catttactct ctctgtttgc tctggttaat |
| 721 | aatctcagga gcacaaacat tccttactag ttctagagcg gccgccagtg tgctggaatt |
| 781 | cggctttttt agggctggaa gctacctttg acatcatttc ctctgcgaat gcatgtataa |
| 841 | tttctacaga acctattaga aaggatcacc cagcctctgc ttttgtacaa ctttccctta |
| 901 | aaaaactgcc aatcccactg ctgtttggcc caatagtgag aactttttcc tgctgcctct |
| 961 | tggtgctttt gcctatggcc cctattctgc ctgctgaaga cactcttgcc agcatggact |
| 1021 | taaacccctc cagctctgac aatcctcttt ctcttttgtt ttacatgaag ggtctggcag |
| 1081 | ccaaagcaat cactcaaagt tcaaacctta tcattttttg ctttgttcct cttggccttg |
| 1141 | gttttgtaca tcagctttga aaataccatc ccagggttaa tgctggggtt aatttataac |
| 1201 | tgagagtgct ctagttctgc aatacaggac atgctataaa aatggaaaga tgttgctttc |
| 1261 | tgagagatca ggtggattct tgggcatttg cttaagcttg gtaccttttt tatgggacat |
| 1321 | attctcatgg agtttgggct gagctgggtc tttctggtgg ccctgctgaa gggagtccag |
| 1381 | tgtgagcagc agggagcttc tagacctgga cctagagatg ctcaggctca tcctggaaga |
| 1441 | cctagagctg tgcctacaca gtgtgatgtg cctcctaatt ctagatttga ttgtgctcct |
| 1501 | gataaggcta taacacagga gcagtgtgag gctagaggat gttgttatat tcctgctaag |
| 1561 | cagggactgc agggagctca gatgggacag ccttggtgtt tttttcctcc ttcttatcct |
| 1621 | tcttataagc tggagaatct gtcttcttct gagatgggat atacagctac actgacaaga |
| 1681 | acaacaccta cattttttcc taaggatatt ctgacactga gactggatgt gatgatggag |
| 1741 | acagagaata gactgcattt tacaattaag gatcctgcta atagaagata tgaggtgcct |
| 1801 | ctagagacac ctagagtgca ttctagagct ccttctcctc tgtattctgt ggagttttct |
| 1861 | gaggagcctt ttggagtgat tgtgcataga cagctggatg gaagagtgct gctgaataca |
| 1921 | acagtggctc ctctgttttt tgctgatcag tttctgcagc tgtctacatc tctgccttct |
| 1981 | cagtatatta caggactggc tgagcatctg tctcctctga tgctgtctac atcttggaca |
| 2041 | agaattacac tgtggaatag agatctggct cctacacctg gagctaatct gtatggatct |
| 2101 | catccttttt atctggctct ggaggatgga ggatctgctc atggagtgtt tctgctgaat |
| 2161 | tctaatgcta tggatgtagt gctgcagcct tctcctgctc tgtcttggag atctacagga |
| 2221 | ggaattctgg atgtgtatat ttttctagga cctgagccta agtctgtggt gcagcagtat |
| 2281 | ctggatgtag tgggatatcc ttttatgcct ccttattggg gactgggatt tcatctgtgt |
| 2341 | agatggggat attcttctac agctattaca agacaggtgg ttgagaatat gacaagagct |
| 2401 | cattttcctc tggatgtgca gtggaatgat ctagattata tggattctag aagagatttt |
| 2461 | acatttaata aggatggatt tagagatttt cctgctatgg tgcaggagct gcatcaggga |
| 2521 | ggaagaagat atatgatgat tgtggatcct gctatttctt cttctggacc tgctggatct |
| 2581 | tatagacctt atgatgaggg actgagaaga ggagtgttta ttacaaatga gacaggacag |
| 2641 | cctctgattg gaaaggtgtg gcctggatct acagcttttc ctgattttac aaatcctaca |
| 2701 | gctctggctt ggtgggagga tatggtggct gagtttcatg atcaggtgcc ttttgatgga |
| 2761 | atgtggattg atatgaatga gccttctaat tttataagag gatctgagga tggatgtcct |
| 2821 | aataatgagc tagagaatcc tccttatgtg cctggagtag tgggaggaac actgcaggct |
| 2881 | gctacaattt gtgcttcttc tcatcagttt ctgtctacac attataatct gcataatctg |
| 2941 | tatggactga cagaggctat tgcttctcat agagctctgg tgaaggctag aggaacaaga |
| 3001 | ccttttgtga tttctagatc tacatttgct ggacatggaa gatatgctgg acattggaca |
| 3061 | ggagatgtat ggtcttcttg ggagcagcta gcttcttctg tgcctgagat tctgcagttt |
| 3121 | aatctgctag gagtgcctct ggtgggagct gatgtgtgtg gatttctggg aaatacatct |
| 3181 | gaggagctgt gtgtgagatg gacacagctg ggagcttttt atccttttat gagaaatcat |
| 3241 | aattctctgc tgtctctgcc tcaggagcct tattcttttt ctgagcctgc tcagcaggct |
| 3301 | atgagaaagg ctctgacact gagatatgct ctgctgcctc atctgtatac actgtttcat |
| 3361 | caggctcatg tggctggaga gacagtagct agacctctgt ttctggagtt tcctaaggat |
| 3421 | tcttctacat ggacagttga tcatcagctg ctgtggggag aggctctgct gattacacct |
| 3481 | gtgctgcagg ctggaaaggc tgaggtgaca ggatattttc ctctgggaac atggtatgat |
| 3541 | ctgcagacag tgcctataga ggctctggga tctctgcctc ctcctcctgc tgctcctaga |
| 3601 | gagcctgcta ttcattctga gggacagtgg gtgacactgc ctgctcctct ggatacaatt |
| 3661 | aatgtgcatc tgagagctgg atatattatt cctctgcagg gacctggact gacaacaaca |
| 3721 | gagtctagac agcagcctat ggctctggct gtggctctga caaagggagg agaggctaga |
| 3781 | ggagagctgt tttgggatga tggagagtct ctggaggtgc tggagagagg agcttataca |
| 3841 | caggtgattt ttctggctag aaataataca attgtgaatg agctggtgag agtgacatct |
| 3901 | gagggagctg gactgcagct gcagaaggtg acagtgctgg gagtggctac agctcctcag |
| 3961 | caggtgctgt ctaatggagt gcctgtgtct aattttacat attctcctga tacaaaggtg |
| 4021 | ctggatattt gtgtgtctct gctgatggga gagcagtttc tggtgtcttg gtgttaatga |
| 4081 | tttaaatctc gagccgggcg gagtgtgtta gtctctccag agggaggctg gttccccagg |
| 4141 | gaagcagagc ctgtgtgcgg gcagcagctg tgtgcgggcc tgggggttgt taagtgcaat |
| 4201 | tatttttaat aaaaggggca tttggaaaaa aaaaaaaaag gtagcagtcg acagatgaat |
| 4261 | tctgcagatc tgtggcttct agctgcccgg gtggcatccc tgtgacccct ccccagtgcc |
| 4321 | tctcctggcc ctggaagttg ccactccagt gcccaccagc cttgtcctaa taaaattaag |
| 4381 | ttgcatcatt ttgtctgact aggtgtcctt ctataatatt atggggtgga ggggggtggt |
| 4441 | atggagcaag gggcaagttg ggaagacaac ctgtagggcc tgcggggtct attgggaacc |
| 4501 | aagctggagt gcagtggcac aatcttggct cactgcaatc tccgcctcct gggttcaagc |
| 4561 | gattctcctg cctcagcctc ccgagttgtt gggattccag gcatgcatga ccaggctcag |
| 4621 | ctaatttttg tttttttggt agagacgggg tttcaccata ttggccaggc tggtctccaa |
| 4681 | ctcctaatct caggtgatct acccaccttg gcctcccaaa ttgctgggat tacaggcgtg |
| 4741 | aaccactgct cccttccctg tccttctgat tttaaaaaaa agagaaatgt tctggcacct |
| 4801 | gcacttgcac tggggacagc ctattttgct agtttgtttt gtttcgtttt gttttgatgg |
| 4861 | agagcgtatg ttgtttaaac gcggccgcgt agataagtag catggcgggt taatcattaa |
| 4921 | ctacaaggaa cccctagtga tggagttggc cactccctct ctgcgcgctc gctcgctcac |
| 4981 | tgaggccggg cgaccaaagg tcgcccgacg cccgggcttt gcccgggcgg cctcagtgag |
| 5041 | cgagcgagcg cgcagttaat taaggcgccc taggccgacc cttagactct gtactcagtt |
| 5101 | ctataaacga gccattggat acgagatccg tagattgata agggacacgg aatatccccg |
| 5161 | gacgcaatag acaccggtgg acagcttggt atcctgagca cagtcgcgcg tccgaatcta |
| 5221 | gctctacttt agaggccccg gattctgatg gtcgtagacc gcagaaccga ttggggggat |
| 5281 | gagatctact agttatcagc acacaattgc ccattatacg cgcgtataat ggactattgt |
| 5341 | gtgctgatat agggataaca gggtaattct agagctagca tatggatcca tcgatttgat |
| 5401 | gcggtatttt ctccttacgc atctgtgcgg tatttcacac cgcatacgtc aaagcaacca |
| 5461 | tagtacgcgc cctgtagcgg cgcattaagc gcggcgggtg tggtggttac gcgcagcgtg |
| 5521 | accgctacac ttgccagcgc cctagcgccc gctcctttcg ctttcttccc ttcctttctc |
| 5581 | gccacgttcg ccggctttcc ccgtcaagct ctaaatcggg ggctcccttt agggttccga |
| 5641 | tttagtgctt tacggcacct cgaccccaaa aaacttgatt tgggtgatgg ttcacgtagt |
| 5701 | gggccatcgc cctgatagac ggtttttcgc cctttgacgt tggagtccac gttctttaat |
| 5761 | agtggactct tgttccaaac tggaacaaca ctcaactcta tctcgggcta ttcttttgat |
| 5821 | ttataaggga ttttgccgat ttcggtctat tggttaaaaa atgagctgat ttaacaaaaa |
| 5881 | tttaacgcga attttaacaa aatattaacg tttacaattt tatggtgcac tctcagtaca |
| 5941 | atctgctctg atgccgcata gttaagccag ccccgacacc cgccaacacc cgctgacgcg |
| 6001 | ccctgacggg cttgtctgct cccggcatcc gcttacagac aagctgtgac cgtctccggg |
| 6061 | agctgcatgt gtcagaggtt ttcaccgtca tcaccgaaac gcgcgagacg aaagggcctc |
| 6121 | gtgatacgcc tatttttata ggttaatgtc atgataataa tggtttctta gacgtcaggt |
| 6181 | ggcacttttc ggggaaatgt gcgcggaacc cctatttgtt tatttttcta aatacattca |
| 6241 | aatatgtatc cgctcatgag acaataaccc tgataaatgc ttcaataata ttgaaaaagg |
| 6301 | aagagtatga gccatattca acgggaaacg tcgaggccgc gattaaattc caacatggat |
| 6361 | gctgatttat atgggtataa atgggctcgc gataatgtcg ggcaatcagg tgcgacaatc |
| 6421 | tatcgcttgt atgggaagcc cgatgcgcca gagttgtttc tgaaacatgg caaaggtagc |
| 6481 | gttgccaatg atgttacaga tgagatggtc agactaaact ggctgacgga atttatgcct |
| 6541 | cttccgacca tcaagcattt tatccgtact cctgatgatg catggttact caccactgcg |
| 6601 | atccccggaa aaacagcatt ccaggtatta gaagaatatc ctgattcagg tgaaaatatt |
| 6661 | gttgatgcgc tggcagtgtt cctgcgccgg ttgcattcga ttcctgtttg taattgtcct |
| 6721 | tttaacagcg atcgcgtatt tcgtctcgct caggcgcaat cacgaatgaa taacggtttg |
| 6781 | gttgatgcga gtgattttga tgacgagcgt aatggctggc ctgttgaaca agtctggaaa |
| 6841 | gaaatgcata aacttttgcc attctcaccg gattcagtcg tcactcatgg tgatttctca |
| 6901 | cttgataacc ttatttttga cgaggggaaa ttaataggtt gtattgatgt tggacgagtc |
| 6961 | ggaatcgcag accgatacca ggatcttgcc atcctatgga actgcctcgg tgagttttct |
| 7021 | ccttcattac agaaacggct ttttcaaaaa tatggtattg ataatcctga tatgaataaa |
| 7081 | ttgcagtttc atttgatgct cgatgagttt ttctaagcgt ataatggtct agagctagca |
| 7141 | tatggatcca tcgattccat tatacgcctg tcagaccaag tttactcata tatactttag |
| 7201 | attgatttaa aacttcattt ttaatttaaa aggatctagg tgaagatcct ttttgataat |
| 7261 | ctcatgacca aaatccctta acgtgagttt tcgttccact gagcgtcaga ccccgtagaa |
| 7321 | aagatcaaag gatcttcttg agatcctttt tttctgcgcg taatctgctg cttgcaaaca |
| 7381 | aaaaaaccac cgctaccagc ggtggtttgt ttgccggatc aagagctacc aactcttttt |
| 7441 | ccgaaggtaa ctggcttcag cagagcgcag ataccaaata ctgttcttct agtgtagccg |
| 7501 | tagttaggcc accacttcaa gaactctgta gcaccgccta catacctcgc tctgctaatc |
| 7561 | ctgttaccag tggctgctgc cagtggcgat aagtcgtgtc ttaccgggtt ggactcaaga |
| 7621 | cgatagttac cggataaggc gcagcggtcg ggctgaacgg ggggttcgtg cacacagccc |
| 7681 | agcttggagc gaacgaccta caccgaactg agatacctac agcgtgagct atgagaaagc |
| 7741 | gccacgcttc ccgaagggag aaaggcggac aggtatccgg taagcggcag ggtcggaaca |
| 7801 | ggagagcgca cgagggagct tccaggggga aacgcctggt atctttatag tcctgtcggg |
| 7861 | tttcgccacc tctgacttga gcgtcgattt ttgtgatgct cgtcaggggg gcggagccta |
| 7921 | tggaaaaacg ccagcaacgc ggccttttta cggttcctgg ccttttgctg gccttttgct |
| 7981 | cacatgt |

| pP071_seq100-IL2wt_25-56 deletion (SEQ ID NO: 476) | |
|---|---|
| (SEQ ID NO: 476) | |
| 1 | tctagagcta gcatatggat ccatcgattt agggataaca gggtaattat cagcacacaa |
| 61 | ttgcccatta tacgcgcgta taatggacta ttgtgtgctg atatctgtac acttaagggc |
| 121 | tagatcttag cttacgtcac tagagggtcc acgtttagtt tttaagatcc attgatctcc |
| 181 | taaacgctgc aagattcgca acctggtata cttagcctag gcgctaggtc ctagtgcagc |
| 241 | gggacttttt ttctaaagtc gttgagagga ggagtcgtca gaccagatag ctttgatgtc |
| 301 | ctgatcggaa ggatcgttgg cccccctgca ggcagctgtt aattaactgc gcgctcgctc |
| 361 | gctcactgag gccgcccggg caaagcccgg gcgtcgggcg acctttggtc gcccggcctc |
| 421 | agtgagcgag cgagcgcgca gagagggagt ggccaactcc atcactaggg gttccttgta |
| 481 | gttaatgatt aacccgccat gctacttatc tacggcgcgc cacgcgttct aggagttaat |
| 541 | ttttaaaaag cagtcaaaag tccaagtgcc cttgcgagca tttactctct ctgtttgctc |
| 601 | tggttaataa tctcaggagc acaaacattc cttactagtt ctaggagtta atttttaaaa |
| 661 | agcagtcaaa agtccaagtg cccttgcgag catttactct ctctgtttgc tctggttaat |
| 721 | aatctcagga gcacaaacat tccttactag ttctagagcg gccgccagtg tgctggaatt |
| 781 | cggctttttt agggctggaa gctacctttg acatcatttc ctctgcgaat gcatgtataa |
| 841 | tttctacaga acctattaga aaggatcacc cagcctctgc ttttgtacaa ctttccctta |
| 901 | aaaaactgcc aatcccactg ctgtttggcc caatagtgag aactttttcc tgctgcctct |
| 961 | tggtgctttt gcctatggcc cctattctgc ctgctgaaga cactcttgcc agcatggact |
| 1021 | taaacccctc cagctctgac aatcctcttt ctcttttgtt ttacatgaag ggtctggcag |
| 1081 | ccaaagcaat cactcaaagt tcaaacctta tcattttttg ctttgttcct cttggccttg |
| 1141 | gttttgtaca tcagctttga aaataccatc ccagggttaa tgctggggtt aatttataac |
| 1201 | tgagagtgct ctagttctgc aatacaggac atgctataaa aatggaaaga tgttgctttc |
| 1261 | tgagagatca ggtggattct tgggcatttg cttaagcttg gtaccttttt tatgggggtg |
| 1321 | aggcaccctc cctgttctca caggctgctg gctgtgtgtg ctctggtgtc tctggccact |
| 1381 | gccatgtaca gaatgcagct gctgtcctgc attgcactgt cactggcact ggttaccaac |
| 1441 | tcacagcagg gggccagcag gccaggcccc agggatgccc aggcccaccc tggcagaccc |
| 1501 | agggctgtgc ccacccagtg tgatgtgcct cccaacagca gatttgactg tgcccctgat |
| 1561 | aaggccatta ctcaggaaca gtgtgaggcc aggggctgct gctatatccc tgccaagcag |
| 1621 | ggcctgcagg gggcccagat ggggcagccc tggtgcttct tcccccccag ctacccctct |
| 1681 | tataagctgg agaatctgag cagctctgaa atgggctaca ctgccactct gaccaggact |
| 1741 | acccccacct tcttccccaa ggatattctg actctgaggc tggatgtgat gatggagact |
| 1801 | gagaacaggc tgcacttcac catcaaggac cctgccaaca ggaggtatga ggtgcccctg |
| 1861 | gaaactccca gggtgcactc tagggccccc agccccctgt attctgtgga gttctctgag |
| 1921 | gagccttttg gggtcattgt ccacaggcag ctggatggca gggtgctgct gaatactact |
| 1981 | gtggcccctc tgttctttgc tgaccagttc ctgcagctga gcaccagcct gccttctcag |
| 2041 | tacattactg gcctggctga gcatctgagc cccctgatgc tgagcacctc ttggaccaga |
| 2101 | atcaccctgt ggaacaggga cctggctccc actcctgggg ccaacctgta tggcagccac |
| 2161 | cccttctacc tggccctgga ggatgggggc tctgcccatg gggtgttcct gctgaacagc |
| 2221 | aatgccatgg atgtggtgct gcagccctct cctgccctgt cttggagatc tactgggggc |
| 2281 | atcctggatg tgtatatctt cctggggcct gagcccaagt ctgtggtgca gcagtacctg |
| 2341 | gatgtggtgg gctacccctt catgcccccc tactggggcc tgggcttcca cctgtgcagg |
| 2401 | tggggctact cttctactgc tatcaccagg caggtggtgg agaacatgac cagggctcac |
| 2461 | ttccctctgg atgtgcagtg gaatgacctg gactacatgg actctaggag agacttcact |
| 2521 | tttaataagg atgggttcag ggactttcct gccatggtgc aggagctgca tcaggggggc |
| 2581 | aggagatata tgatgattgt ggaccctgct atttctagct ctggccctgc tggcagctat |
| 2641 | aggccctatg atgaggggct gaggaggggg gtgttcatca ctaatgagac tggccagccc |
| 2701 | ctgattggca aggtgtggcc tggctctact gccttccctg atttcaccaa ccccactgcc |
| 2761 | ctggcctggt gggaggatat ggtggctgag tttcatgacc aggtgccctt tgatggcatg |
| 2821 | tggattgaca tgaatgagcc cagcaacttt atcaggggct ctgaagatgg ctgccccaac |
| 2881 | aatgagctgg agaacccccc ctatgtgcct ggggtggtgg ggggcaccct gcaggctgcc |
| 2941 | accatctgtg ccagcagcca ccagttcctg agcacccact ataacctgca caacctgtat |
| 3001 | ggcctgactg aggccattgc ctctcacagg gccctggtga aggctagggg gactaggccc |
| 3061 | tttgtgatca gcaggtctac ttttgctggc catggcaggt atgctgggca ctggactggg |
| 3121 | gatgtgtggt ctagctggga gcagctggcc agctctgtgc ctgagatcct gcagtttaat |
| 3181 | ctgctggggg tgcccctggt gggggctgat gtgtgtggct tcctgggcaa tacctctgag |
| 3241 | gagctgtgtg tgaggtggac tcagctgggg gctttctacc ccttcatgag aaaccacaac |
| 3301 | tctctgctga gcctgcccca ggagccctat tctttttctg agcctgccca gcaggctatg |
| 3361 | aggaaggccc tgactctgag gtatgccctg ctgccccacc tgtataccct gttccatcag |
| 3421 | gcccatgtgg ctggggagac tgtggccaga cctctgttcc tggagttccc caaggatagc |
| 3481 | tctacttgga ctgtggacca ccagctgctg tggggggagg ctctgctgat cacccctgtg |
| 3541 | ctgcaggctg ggaaggctga ggtgactggc tatttccccc tgggcacctg gtatgatctg |
| 3601 | cagactgtgc ccattgaggc cctgggctct ctgccccctc cccctgctgc ccccagggag |
| 3661 | cctgccatcc actctgaggg ccagtgggtg accctgcctg cccctctgga cactatcaat |
| 3721 | gtgcacctga gggctggcta catcatcccc ctgcagggcc ctggcctgac taccactgag |
| 3781 | tctaggcagc agcccatggc cctggctgtg gctctgacca agggggggga ggccaggggg |
| 3841 | gagctgttct gggatgatgg ggagtctctg gaggtgctgg agaggggggc ctacacccag |
| 3901 | gtgatcttcc tggctaggaa taacaccatt gtcaatgagc tggtgagggt gacctctgag |
| 3961 | ggggctggcc tgcagctgca gaaggtgact gtgctggggg tggctactgc cccccagcag |
| 4021 | gtgctgagca atggggtgcc tgtgagcaac ttcacctata gccctgacac caaggtgctg |
| 4081 | gacatctgtg tgagcctgct gatgggggag cagttcctgg tgagctggtg ctaatttaaa |
| 4141 | tctcgagccg ggcggagtgt gttagtctct ccagagggag gctggttccc cagggaagca |
| 4201 | gagcctgtgt gcgggcagca gctgtgtgcg ggcctggggg ttgttaagtg caattatttt |
| 4261 | taataaaagg ggcatttgga aaaaaaaaaa aaaggtagca gtcgacagat gaattctgca |
| 4321 | gatctgtggc ttctagctgc ccgggtggca tccctgtgac ccctccccag tgcctctcct |
| 4381 | ggccctggaa gttgccactc cagtgcccac cagccttgtc ctaataaaat taagttgcat |
| 4441 | cattttgtct gactaggtgt ccttctataa tattatgggg tggagggggg tggtatggag |
| 4501 | caaggggcaa gttgggaaga caacctgtag ggcctgcggg gtctattggg aaccaagctg |
| 4561 | gagtgcagtg gcacaatctt ggctcactgc aatctccgcc tcctgggttc aagcgattct |
| 4621 | cctgcctcag cctcccgagt tgttgggatt ccaggcatgc atgaccaggc tcagctaatt |
| 4681 | tttgtttttt tggtagagac ggggtttcac catattggcc aggctggtct ccaactccta |
| 4741 | atctcaggtg atctacccac cttggcctcc caaattgctg ggattacagg cgtgaaccac |
| 4801 | tgctcccttc cctgtccttc tgattttaaa aaaaagagaa atgttctggc acctgcactt |
| 4861 | gcactgggga cagcctattt tgctagtttg ttttgtttcg ttttgttttg atggagagcg |
| 4921 | tatgttgttt aaacgcggcc gcgtagataa gtagcatggc gggttaatca ttaactacaa |
| 4981 | ggaaccccta gtgatggagt tggccactcc ctctctgcgc gctcgctcgc tcactgaggc |
| 5041 | cgggcgacca aaggtcgccc gacgcccggg ctttgcccgg gcggcctcag tgagcgagcg |
| 5101 | agcgcgcagt taattaaggc gccctaggcc gacccttaga ctctgtactc agttctataa |
| 5161 | acgagccatt ggatacgaga tccgtagatt gataagggac acggaatatc cccggacgca |
| 5221 | atagacaccg gtggacagct tggtatcctg agcacagtcg cgcgtccgaa tctagctcta |
| 5281 | ctttagaggc cccggattct gatggtcgta gaccgcagaa ccgattgggg ggatgagatc |
| 5341 | tactagttat cagcacacaa ttgcccatta tacgcgcgta taatggacta ttgtgtgctg |
| 5401 | atatagggat aacagggtaa ttctagagct agcatatgga tccatcgatt tgatgcggta |
| 5461 | ttttctcctt acgcatctgt gcggtatttc acaccgcata cgtcaaagca accatagtac |
| 5521 | gcgccctgta gcggcgcatt aagcgcggcg ggtgtggtgg ttacgcgcag cgtgaccgct |
| 5581 | acacttgcca gcgccctagc gcccgctcct ttcgctttct tcccttcctt tctcgccacg |
| 5641 | ttcgccggct ttccccgtca agctctaaat cgggggctcc ctttagggtt ccgatttagt |
| 5701 | gctttacggc acctcgaccc caaaaaactt gatttgggtg atggttcacg tagtgggcca |
| 5761 | tcgccctgat agacggtttt tcgccctttg acgttggagt ccacgttctt taatagtgga |
| 5821 | ctcttgttcc aaactggaac aacactcaac tctatctcgg gctattcttt tgatttataa |
| 5881 | gggattttgc cgatttcggt ctattggtta aaaaatgagc tgatttaaca aaaatttaac |
| 5941 | gcgaatttta acaaaatatt aacgtttaca attttatggt gcactctcag tacaatctgc |
| 6001 | tctgatgccg catagttaag ccagccccga cacccgccaa cacccgctga cgcgccctga |
| 6061 | cgggcttgtc tgctcccggc atccgcttac agacaagctg tgaccgtctc cgggagctgc |
| 6121 | atgtgtcaga ggttttcacc gtcatcaccg aaacgcgcga gacgaaaggg cctcgtgata |
| 6181 | cgcctatttt tataggttaa tgtcatgata ataatggttt cttagacgtc aggtggcact |
| 6241 | tttcggggaa atgtgcgcgg aacccctatt tgtttatttt tctaaataca ttcaaatatg |
| 6301 | tatccgctca tgagacaata accctgataa atgcttcaat aatattgaaa aaggaagagt |
| 6361 | atgagccata ttcaacggga aacgtcgagg ccgcgattaa attccaacat ggatgctgat |
| 6421 | ttatatgggt ataaatgggc tcgcgataat gtcgggcaat caggtgcgac aatctatcgc |
| 6481 | ttgtatggga agcccgatgc gccagagttg tttctgaaac atggcaaagg tagcgttgcc |
| 6541 | aatgatgtta cagatgagat ggtcagacta aactggctga cggaatttat gcctcttccg |
| 6601 | accatcaagc attttatccg tactcctgat gatgcatggt tactcaccac tgcgatcccc |
| 6661 | ggaaaaacag cattccaggt attagaagaa tatcctgatt caggtgaaaa tattgttgat |
| 6721 | gcgctggcag tgttcctgcg ccggttgcat tcgattcctg tttgtaattg tccttttaac |
| 6781 | agcgatcgcg tatttcgtct cgctcaggcg caatcacgaa tgaataacgg tttggttgat |
| 6841 | gcgagtgatt ttgatgacga gcgtaatggc tggcctgttg aacaagtctg gaaagaaatg |
| 6901 | cataaacttt tgccattctc accggattca gtcgtcactc atggtgattt ctcacttgat |
| 6961 | aaccttattt ttgacgaggg gaaattaata ggttgtattg atgttggacg agtcggaatc |
| 7021 | gcagaccgat accaggatct tgccatccta tggaactgcc tcggtgagtt ttctccttca |
| 7081 | ttacagaaac ggctttttca aaaatatggt attgataatc ctgatatgaa taaattgcag |
| 7141 | tttcatttga tgctcgatga gtttttctaa gcgtataatg gtctagagct agcatatgga |
| 7201 | tccatcgatt ccattatacg cctgtcagac caagtttact catatatact ttagattgat |
| 7261 | ttaaaacttc atttttaatt taaaaggatc taggtgaaga tcctttttga taatctcatg |
| 7321 | accaaaatcc cttaacgtga gttttcgttc cactgagcgt cagaccccgt agaaaagatc |
| 7381 | aaaggatctt cttgagatcc tttttttctg cgcgtaatct gctgcttgca aacaaaaaaa |
| 7441 | ccaccgctac cagcggtggt ttgtttgccg gatcaagagc taccaactct ttttccgaag |
| 7501 | gtaactggct tcagcagagc gcagatacca aatactgttc ttctagtgta gccgtagtta |
| 7561 | ggccaccact tcaagaactc tgtagcaccg cctacatacc tcgctctgct aatcctgtta |
| 7621 | ccagtggctg ctgccagtgg cgataagtcg tgtcttaccg ggttggactc aagacgatag |
| 7681 | ttaccggata aggcgcagcg gtcgggctga acggggggtt cgtgcacaca gcccagcttg |
| 7741 | gagcgaacga cctacaccga actgagatac ctacagcgtg agctatgaga aagcgccacg |
| 7801 | cttcccgaag ggagaaaggc ggacaggtat ccggtaagcg gcagggtcgg aacaggagag |
| 7861 | cgcacgaggg agcttccagg gggaaacgcc tggtatcttt atagtcctgt cgggtttcgc |
| 7921 | cacctctgac ttgagcgtcg atttttgtga tgctcgtcag gggggcggag cctatggaaa |
| 7981 | aacgccagca acgcggcctt tttacggttc ctggcctttt gctggccttt tgctcacatg |
| 8041 | t |

| pP072_seq100-201Ig_25-56 deletion (SEQ ID NO: 477) | |
|---|---|
| (SEQ ID NO: 477) | |
| 1 | tctagagcta gcatatggat ccatcgattt agggataaca gggtaattat cagcacacaa |
| 61 | ttgcccatta tacgcgcgta taatggacta ttgtgtgctg atatctgtac acttaagggc |
| 121 | tagatcttag cttacgtcac tagagggtcc acgtttagtt tttaagatcc attgatctcc |
| 181 | taaacgctgc aagattcgca acctggtata cttagcctag gcgctaggtc ctagtgcagc |
| 241 | gggacttttt ttctaaagtc gttgagagga ggagtcgtca gaccagatag ctttgatgtc |
| 301 | ctgatcggaa ggatcgttgg cccccctgca ggcagctgtt aattaactgc gcgctcgctc |
| 361 | gctcactgag gccgcccggg caaagcccgg gcgtcgggcg acctttggtc gcccggcctc |
| 421 | agtgagcgag cgagcgcgca gagagggagt ggccaactcc atcactaggg gttccttgta |
| 481 | gttaatgatt aacccgccat gctacttatc tacggcgcgc cacgcgttct aggagttaat |
| 541 | ttttaaaaag cagtcaaaag tccaagtgcc cttgcgagca tttactctct ctgtttgctc |
| 601 | tggttaataa tctcaggagc acaaacattc cttactagtt ctaggagtta atttttaaaa |
| 661 | agcagtcaaa agtccaagtg cccttgcgag catttactct ctctgtttgc tctggttaat |
| 721 | aatctcagga gcacaaacat tccttactag ttctagagcg gccgccagtg tgctggaatt |
| 781 | cggctttttt agggctggaa gctacctttg acatcatttc ctctgcgaat gcatgtataa |
| 841 | tttctacaga acctattaga aaggatcacc cagcctctgc ttttgtacaa ctttccctta |
| 901 | aaaaactgcc aatcccactg ctgtttggcc caatagtgag aactttttcc tgctgcctct |
| 961 | tggtgctttt gcctatggcc cctattctgc ctgctgaaga cactcttgcc agcatggact |
| 1021 | taaacccctc cagctctgac aatcctcttt ctcttttgtt ttacatgaag ggtctggcag |
| 1081 | ccaaagcaat cactcaaagt tcaaacctta tcattttttg ctttgttcct cttggccttg |
| 1141 | gttttgtaca tcagctttga aaataccatc ccagggttaa tgctggggtt aatttataac |
| 1201 | tgagagtgct ctagttctgc aatacaggac atgctataaa aatggaaaga tgttgctttc |
| 1261 | tgagagatca ggtggattct tgggcatttg cttaagcttg gtaccttttt tatgggggtg |
| 1321 | aggcaccctc cctgttctca caggctgctg gctgtgtgtg ctctggtgtc tctggccact |
| 1381 | gccatggagt ttgggctgag ctgggtcttt ctggtggccc tgctgaaggg agtccagtgt |
| 1441 | gagcagcagg gggccagcag gccaggcccc agggatgccc aggcccaccc tggcagaccc |
| 1501 | agggctgtgc ccacccagtg tgatgtgcct cccaacagca gatttgactg tgcccctgat |
| 1561 | aaggccatta ctcaggaaca gtgtgaggcc aggggctgct gctatatccc tgccaagcag |
| 1621 | ggcctgcagg gggcccagat ggggcagccc tggtgcttct tcccccccag ctacccctct |
| 1681 | tataagctgg agaatctgag cagctctgaa atgggctaca ctgccactct gaccaggact |
| 1741 | acccccacct tcttccccaa ggatattctg actctgaggc tggatgtgat gatggagact |
| 1801 | gagaacaggc tgcacttcac catcaaggac cctgccaaca ggaggtatga ggtgcccctg |
| 1861 | gaaactccca gggtgcactc tagggccccc agccccctgt attctgtgga gttctctgag |
| 1921 | gagccttttg gggtcattgt ccacaggcag ctggatggca gggtgctgct gaatactact |
| 1981 | gtggcccctc tgttctttgc tgaccagttc ctgcagctga gcaccagcct gccttctcag |
| 2041 | tacattactg gcctggctga gcatctgagc cccctgatgc tgagcacctc ttggaccaga |
| 2101 | atcaccctgt ggaacaggga cctggctccc actcctgggg ccaacctgta tggcagccac |
| 2161 | cccttctacc tggccctgga ggatgggggc tctgcccatg gggtgttcct gctgaacagc |
| 2221 | aatgccatgg atgtggtgct gcagccctct cctgccctgt cttggagatc tactgggggc |
| 2281 | atcctggatg tgtatatctt cctggggcct gagcccaagt ctgtggtgca gcagtacctg |
| 2341 | gatgtggtgg gctacccctt catgcccccc tactggggcc tgggcttcca cctgtgcagg |
| 2401 | tggggctact cttctactgc tatcaccagg caggtggtgg agaacatgac cagggctcac |
| 2461 | ttccctctgg atgtgcagtg gaatgacctg gactacatgg actctaggag agacttcact |
| 2521 | tttaataagg atgggttcag ggactttcct gccatggtgc aggagctgca tcaggggggc |
| 2581 | aggagatata tgatgattgt ggaccctgct atttctagct ctggccctgc tggcagctat |
| 2641 | aggccctatg atgaggggct gaggaggggg gtgttcatca ctaatgagac tggccagccc |
| 2701 | ctgattggca aggtgtggcc tggctctact gccttccctg atttcaccaa ccccactgcc |
| 2761 | ctggcctggt gggaggatat ggtggctgag tttcatgacc aggtgccctt tgatggcatg |
| 2821 | tggattgaca tgaatgagcc cagcaacttt atcaggggct ctgaagatgg ctgccccaac |
| 2881 | aatgagctgg agaacccccc ctatgtgcct ggggtggtgg ggggcaccct gcaggctgcc |
| 2941 | accatctgtg ccagcagcca ccagttcctg agcacccact ataacctgca caacctgtat |
| 3001 | ggcctgactg aggccattgc ctctcacagg gccctggtga aggctagggg gactaggccc |
| 3061 | tttgtgatca gcaggtctac ttttgctggc catggcaggt atgctgggca ctggactggg |
| 3121 | gatgtgtggt ctagctggga gcagctggcc agctctgtgc ctgagatcct gcagtttaat |
| 3181 | ctgctggggg tgcccctggt gggggctgat gtgtgtggct tcctgggcaa tacctctgag |
| 3241 | gagctgtgtg tgaggtggac tcagctgggg gctttctacc ccttcatgag aaaccacaac |
| 3301 | tctctgctga gcctgcccca ggagccctat tctttttctg agcctgccca gcaggctatg |
| 3361 | aggaaggccc tgactctgag gtatgccctg ctgccccacc tgtataccct gttccatcag |
| 3421 | gcccatgtgg ctggggagac tgtggccaga cctctgttcc tggagttccc caaggatagc |
| 3481 | tctacttgga ctgtggacca ccagctgctg tggggggagg ctctgctgat cacccctgtg |
| 3541 | ctgcaggctg ggaaggctga ggtgactggc tatttccccc tgggcacctg gtatgatctg |
| 3601 | cagactgtgc ccattgaggc cctgggctct ctgccccctc cccctgctgc ccccagggag |
| 3661 | cctgccatcc actctgaggg ccagtgggtg accctgcctg cccctctgga cactatcaat |
| 3721 | gtgcacctga gggctggcta catcatcccc ctgcagggcc ctggcctgac taccactgag |
| 3781 | tctaggcagc agcccatggc cctggctgtg gctctgacca agggggggga ggccaggggg |
| 3841 | gagctgttct gggatgatgg ggagtctctg gaggtgctgg agaggggggc ctacacccag |
| 3901 | gtgatcttcc tggctaggaa taacaccatt gtcaatgagc tggtgagggt gacctctgag |
| 3961 | ggggctggcc tgcagctgca gaaggtgact gtgctggggg tggctactgc cccccagcag |
| 4021 | gtgctgagca atggggtgcc tgtgagcaac ttcacctata gccctgacac caaggtgctg |
| 4081 | gacatctgtg tgagcctgct gatgggggag cagttcctgg tgagctggtg ctaatttaaa |
| 4141 | tctcgagccg ggcggagtgt gttagtctct ccagagggag gctggttccc cagggaagca |
| 4201 | gagcctgtgt gcgggcagca gctgtgtgcg ggcctggggg ttgttaagtg caattatttt |
| 4261 | taataaaagg ggcatttgga aaaaaaaaaa aaaggtagca gtcgacagat gaattctgca |
| 4321 | gatctgtggc ttctagctgc ccgggtggca tccctgtgac ccctccccag tgcctctcct |
| 4381 | ggccctggaa gttgccactc cagtgcccac cagccttgtc ctaataaaat taagttgcat |
| 4441 | cattttgtct gactaggtgt ccttctataa tattatgggg tggagggggg tggtatggag |
| 4501 | caaggggcaa gttgggaaga caacctgtag ggcctgcggg gtctattggg aaccaagctg |
| 4561 | gagtgcagtg gcacaatctt ggctcactgc aatctccgcc tcctgggttc aagcgattct |
| 4621 | cctgcctcag cctcccgagt tgttgggatt ccaggcatgc atgaccaggc tcagctaatt |
| 4681 | tttgtttttt tggtagagac ggggtttcac catattggcc aggctggtct ccaactccta |
| 4741 | atctcaggtg atctacccac cttggcctcc caaattgctg ggattacagg cgtgaaccac |
| 4801 | tgctcccttc cctgtccttc tgattttaaa aaaaagagaa atgttctggc acctgcactt |
| 4861 | gcactgggga cagcctattt tgctagtttg ttttgtttcg ttttgttttg atggagagcg |
| 4921 | tatgttgttt aaacgcggcc gcgtagataa gtagcatggc gggttaatca ttaactacaa |
| 4981 | ggaaccccta gtgatggagt tggccactcc ctctctgcgc gctcgctcgc tcactgaggc |
| 5041 | cgggcgacca aaggtcgccc gacgcccggg ctttgcccgg gcggcctcag tgagcgagcg |
| 5101 | agcgcgcagt taattaaggc gccctaggcc gacccttaga ctctgtactc agttctataa |
| 5161 | acgagccatt ggatacgaga tccgtagatt gataagggac acggaatatc cccggacgca |
| 5221 | atagacaccg gtggacagct tggtatcctg agcacagtcg cgcgtccgaa tctagctcta |
| 5281 | ctttagaggc cccggattct gatggtcgta gaccgcagaa ccgattgggg ggatgagatc |
| 5341 | tactagttat cagcacacaa ttgcccatta tacgcgcgta taatggacta ttgtgtgctg |
| 5401 | atatagggat aacagggtaa ttctagagct agcatatgga tccatcgatt tgatgcggta |
| 5461 | ttttctcctt acgcatctgt gcggtatttc acaccgcata cgtcaaagca accatagtac |
| 5521 | gcgccctgta gcggcgcatt aagcgcggcg ggtgtggtgg ttacgcgcag cgtgaccgct |
| 5581 | acacttgcca gcgccctagc gcccgctcct ttcgctttct tcccttcctt tctcgccacg |
| 5641 | ttcgccggct ttccccgtca agctctaaat cgggggctcc ctttagggtt ccgatttagt |
| 5701 | gctttacggc acctcgaccc caaaaaactt gatttgggtg atggttcacg tagtgggcca |
| 5761 | tcgccctgat agacggtttt tcgccctttg acgttggagt ccacgttctt taatagtgga |
| 5821 | ctcttgttcc aaactggaac aacactcaac tctatctcgg gctattcttt tgatttataa |
| 5881 | gggattttgc cgatttcggt ctattggtta aaaaatgagc tgatttaaca aaaatttaac |
| 5941 | gcgaatttta acaaaatatt aacgtttaca attttatggt gcactctcag tacaatctgc |
| 6001 | tctgatgccg catagttaag ccagccccga cacccgccaa cacccgctga cgcgccctga |
| 6061 | cgggcttgtc tgctcccggc atccgcttac agacaagctg tgaccgtctc cgggagctgc |
| 6121 | atgtgtcaga ggttttcacc gtcatcaccg aaacgcgcga gacgaaaggg cctcgtgata |
| 6181 | cgcctatttt tataggttaa tgtcatgata ataatggttt cttagacgtc aggtggcact |
| 6241 | tttcggggaa atgtgcgcgg aacccctatt tgtttatttt tctaaataca ttcaaatatg |
| 6301 | tatccgctca tgagacaata accctgataa atgcttcaat aatattgaaa aaggaagagt |
| 6361 | atgagccata ttcaacggga aacgtcgagg ccgcgattaa attccaacat ggatgctgat |
| 6421 | ttatatgggt ataaatgggc tcgcgataat gtcgggcaat caggtgcgac aatctatcgc |
| 6481 | ttgtatggga agcccgatgc gccagagttg tttctgaaac atggcaaagg tagcgttgcc |
| 6541 | aatgatgtta cagatgagat ggtcagacta aactggctga cggaatttat gcctcttccg |
| 6601 | accatcaagc attttatccg tactcctgat gatgcatggt tactcaccac tgcgatcccc |
| 6661 | ggaaaaacag cattccaggt attagaagaa tatcctgatt caggtgaaaa tattgttgat |
| 6721 | gcgctggcag tgttcctgcg ccggttgcat tcgattcctg tttgtaattg tccttttaac |
| 6781 | agcgatcgcg tatttcgtct cgctcaggcg caatcacgaa tgaataacgg tttggttgat |
| 6841 | gcgagtgatt ttgatgacga gcgtaatggc tggcctgttg aacaagtctg gaaagaaatg |
| 6901 | cataaacttt tgccattctc accggattca gtcgtcactc atggtgattt ctcacttgat |
| 6961 | aaccttattt ttgacgaggg gaaattaata ggttgtattg atgttggacg agtcggaatc |
| 7021 | gcagaccgat accaggatct tgccatccta tggaactgcc tcggtgagtt ttctccttca |
| 7081 | ttacagaaac ggctttttca aaaatatggt attgataatc ctgatatgaa taaattgcag |
| 7141 | tttcatttga tgctcgatga gtttttctaa gcgtataatg gtctagagct agcatatgga |
| 7201 | tccatcgatt ccattatacg cctgtcagac caagtttact catatatact ttagattgat |
| 7261 | ttaaaacttc atttttaatt taaaaggatc taggtgaaga tcctttttga taatctcatg |
| 7321 | accaaaatcc cttaacgtga gttttcgttc cactgagcgt cagaccccgt agaaaagatc |
| 7381 | aaaggatctt cttgagatcc tttttttctg cgcgtaatct gctgcttgca aacaaaaaaa |
| 7441 | ccaccgctac cagcggtggt ttgtttgccg gatcaagagc taccaactct ttttccgaag |
| 7501 | gtaactggct tcagcagagc gcagatacca aatactgttc ttctagtgta gccgtagtta |
| 7561 | ggccaccact tcaagaactc tgtagcaccg cctacatacc tcgctctgct aatcctgtta |
| 7621 | ccagtggctg ctgccagtgg cgataagtcg tgtcttaccg ggttggactc aagacgatag |
| 7681 | ttaccggata aggcgcagcg gtcgggctga acggggggtt cgtgcacaca gcccagcttg |
| 7741 | gagcgaacga cctacaccga actgagatac ctacagcgtg agctatgaga aagcgccacg |
| 7801 | cttcccgaag ggagaaaggc ggacaggtat ccggtaagcg gcagggtcgg aacaggagag |
| 7861 | cgcacgaggg agcttccagg gggaaacgcc tggtatcttt atagtcctgt cgggtttcgc |
| 7921 | cacctctgac ttgagcgtcg atttttgtga tgctcgtcag gggggcggag cctatggaaa |
| 7981 | aacgccagca acgcggcctt tttacggttc ctggcctttt gctggccttt tgctcacatg |
| 8041 | t |

| pP073_seq3-IL2wt 25-56 deletion (SEQ ID NO: 478) | |
|---|---|
| (SEQ ID NO: 478) | |
| 1 | tctagagcta gcatatggat ccatcgattt agggataaca gggtaattat cagcacacaa |
| 61 | ttgcccatta tacgcgcgta taatggacta ttgtgtgctg atatctgtac acttaagggc |
| 121 | tagatcttag cttacgtcac tagagggtcc acgtttagtt tttaagatcc attgatctcc |
| 181 | taaacgctgc aagattcgca acctggtata cttagcctag gcgctaggtc ctagtgcagc |
| 241 | gggacttttt ttctaaagtc gttgagagga ggagtcgtca gaccagatag ctttgatgtc |
| 301 | ctgatcggaa ggatcgttgg cccccctgca ggcagctgtt aattaactgc gcgctcgctc |
| 361 | gctcactgag gccgcccggg caaagcccgg gcgtcgggcg acctttggtc gcccggcctc |
| 421 | agtgagcgag cgagcgcgca gagagggagt ggccaactcc atcactaggg gttccttgta |
| 481 | gttaatgatt aacccgccat gctacttatc tacggcgcgc cacgcgttct aggagttaat |
| 541 | ttttaaaaag cagtcaaaag tccaagtgcc cttgcgagca tttactctct ctgtttgctc |
| 601 | tggttaataa tctcaggagc acaaacattc cttactagtt ctaggagtta atttttaaaa |
| 661 | agcagtcaaa agtccaagtg cccttgcgag catttactct ctctgtttgc tctggttaat |
| 721 | aatctcagga gcacaaacat tccttactag ttctagagcg gccgccagtg tgctggaatt |
| 781 | cggctttttt agggctggaa gctacctttg acatcatttc ctctgcgaat gcatgtataa |
| 841 | tttctacaga acctattaga aaggatcacc cagcctctgc ttttgtacaa ctttccctta |
| 901 | aaaaactgcc aatcccactg ctgtttggcc caatagtgag aactttttcc tgctgcctct |
| 961 | tggtgctttt gcctatggcc cctattctgc ctgctgaaga cactcttgcc agcatggact |
| 1021 | taaacccctc cagctctgac aatcctcttt ctcttttgtt ttacatgaag ggtctggcag |
| 1081 | ccaaagcaat cactcaaagt tcaaacctta tcattttttg ctttgttcct cttggccttg |
| 1141 | gttttgtaca tcagctttga aaataccatc ccagggttaa tgctggggtt aatttataac |
| 1201 | tgagagtgct ctagttctgc aatacaggac atgctataaa aatggaaaga tgttgctttc |
| 1261 | tgagagatca ggtggattct tgggcatttg cttaagcttg gtaccttttt tatgggagtg |
| 1321 | agacatcctc cttgttctca tagactgctg gctgtgtgtg ctctggtgtc tctggctaca |
| 1381 | gccatgtaca gaatgcagct gctgtcctgc attgcactgt cactggcact ggttaccaac |
| 1441 | tcacagcagg gagcttctag acctggacct agagatgctc aggctcatcc tggaagacct |
| 1501 | agagctgtgc ctacacagtg tgatgtgcct cctaattcta gatttgattg tgctcctgat |
| 1561 | aaggctataa cacaggagca gtgtgaggct agaggatgtt gttatattcc tgctaagcag |
| 1621 | ggactgcagg gagctcagat gggacagcct tggtgttttt ttcctccttc ttatccttct |
| 1681 | tataagctgg agaatctgtc ttcttctgag atgggatata cagctacact gacaagaaca |
| 1741 | acacctacat tttttcctaa ggatattctg acactgagac tggatgtgat gatggagaca |
| 1801 | gagaatagac tgcattttac aattaaggat cctgctaata gaagatatga ggtgcctcta |
| 1861 | gagacaccta gagtgcattc tagagctcct tctcctctgt attctgtgga gttttctgag |
| 1921 | gagccttttg gagtgattgt gcatagacag ctggatggaa gagtgctgct gaatacaaca |
| 1981 | gtggctcctc tgttttttgc tgatcagttt ctgcagctgt ctacatctct gccttctcag |
| 2041 | tatattacag gactggctga gcatctgtct cctctgatgc tgtctacatc ttggacaaga |
| 2101 | attacactgt ggaatagaga tctggctcct acacctggag ctaatctgta tggatctcat |
| 2161 | cctttttatc tggctctgga ggatggagga tctgctcatg gagtgtttct gctgaattct |
| 2221 | aatgctatgg atgtagtgct gcagccttct cctgctctgt cttggagatc tacaggagga |
| 2281 | attctggatg tgtatatttt tctaggacct gagcctaagt ctgtggtgca gcagtatctg |
| 2341 | gatgtagtgg gatatccttt tatgcctcct tattggggac tgggatttca tctgtgtaga |
| 2401 | tggggatatt cttctacagc tattacaaga caggtggttg agaatatgac aagagctcat |
| 2461 | tttcctctgg atgtgcagtg gaatgatcta gattatatgg attctagaag agattttaca |
| 2521 | tttaataagg atggatttag agattttcct gctatggtgc aggagctgca tcagggagga |
| 2581 | agaagatata tgatgattgt ggatcctgct atttcttctt ctggacctgc tggatcttat |
| 2641 | agaccttatg atgagggact gagaagagga gtgtttatta caaatgagac aggacagcct |
| 2701 | ctgattggaa aggtgtggcc tggatctaca gcttttcctg attttacaaa tcctacagct |
| 2761 | ctggcttggt gggaggatat ggtggctgag tttcatgatc aggtgccttt tgatggaatg |
| 2821 | tggattgata tgaatgagcc ttctaatttt ataagaggat ctgaggatgg atgtcctaat |
| 2881 | aatgagctag agaatcctcc ttatgtgcct ggagtagtgg gaggaacact gcaggctgct |
| 2941 | acaatttgtg cttcttctca tcagtttctg tctacacatt ataatctgca taatctgtat |
| 3001 | ggactgacag aggctattgc ttctcataga gctctggtga aggctagagg aacaagacct |
| 3061 | tttgtgattt ctagatctac atttgctgga catggaagat atgctggaca ttggacagga |
| 3121 | gatgtatggt cttcttggga gcagctagct tcttctgtgc ctgagattct gcagtttaat |
| 3181 | ctgctaggag tgcctctggt gggagctgat gtgtgtggat ttctgggaaa tacatctgag |
| 3241 | gagctgtgtg tgagatggac acagctggga gctttttatc cttttatgag aaatcataat |
| 3301 | tctctgctgt ctctgcctca ggagccttat tctttttctg agcctgctca gcaggctatg |
| 3361 | agaaaggctc tgacactgag atatgctctg ctgcctcatc tgtatacact gtttcatcag |
| 3421 | gctcatgtgg ctggagagac agtagctaga cctctgtttc tggagtttcc taaggattct |
| 3481 | tctacatgga cagttgatca tcagctgctg tggggagagg ctctgctgat tacacctgtg |
| 3541 | ctgcaggctg gaaaggctga ggtgacagga tattttcctc tgggaacatg gtatgatctg |
| 3601 | cagacagtgc ctatagaggc tctgggatct ctgcctcctc ctcctgctgc tcctagagag |
| 3661 | cctgctattc attctgaggg acagtgggtg acactgcctg ctcctctgga tacaattaat |
| 3721 | gtgcatctga gagctggata tattattcct ctgcagggac ctggactgac aacaacagag |
| 3781 | tctagacagc agcctatggc tctggctgtg gctctgacaa agggaggaga ggctagagga |
| 3841 | gagctgtttt gggatgatgg agagtctctg gaggtgctgg agagaggagc ttatacacag |
| 3901 | gtgatttttc tggctagaaa taatacaatt gtgaatgagc tggtgagagt gacatctgag |
| 3961 | ggagctggac tgcagctgca gaaggtgaca gtgctgggag tggctacagc tcctcagcag |
| 4021 | gtgctgtcta atggagtgcc tgtgtctaat tttacatatt ctcctgatac aaaggtgctg |
| 4081 | gatatttgtg tgtctctgct gatgggagag cagtttctgg tgtcttggtg ttaatgattt |
| 4141 | aaatctcgag ccgggcggag tgtgttagtc tctccagagg gaggctggtt ccccagggaa |
| 4201 | gcagagcctg tgtgcgggca gcagctgtgt gcgggcctgg gggttgttaa gtgcaattat |
| 4261 | ttttaataaa aggggcattt ggaaaaaaaa aaaaaaggta gcagtcgaca gatgaattct |
| 4321 | gcagatctgt ggcttctagc tgcccgggtg gcatccctgt gacccctccc cagtgcctct |
| 4381 | cctggccctg gaagttgcca ctccagtgcc caccagcctt gtcctaataa aattaagttg |
| 4441 | catcattttg tctgactagg tgtccttcta taatattatg gggtggaggg gggtggtatg |
| 4501 | gagcaagggg caagttggga agacaacctg tagggcctgc ggggtctatt gggaaccaag |
| 4561 | ctggagtgca gtggcacaat cttggctcac tgcaatctcc gcctcctggg ttcaagcgat |
| 4621 | tctcctgcct cagcctcccg agttgttggg attccaggca tgcatgacca ggctcagcta |
| 4681 | atttttgttt ttttggtaga gacggggttt caccatattg gccaggctgg tctccaactc |
| 4741 | ctaatctcag gtgatctacc caccttggcc tcccaaattg ctgggattac aggcgtgaac |
| 4801 | cactgctccc ttccctgtcc ttctgatttt aaaaaaaaga gaaatgttct ggcacctgca |
| 4861 | cttgcactgg ggacagccta ttttgctagt ttgttttgtt tcgttttgtt ttgatggaga |
| 4921 | gcgtatgttg tttaaacgcg gccgcgtaga taagtagcat ggcgggttaa tcattaacta |
| 4981 | caaggaaccc ctagtgatgg agttggccac tccctctctg cgcgctcgct cgctcactga |
| 5041 | ggccgggcga ccaaaggtcg cccgacgccc gggctttgcc cgggcggcct cagtgagcga |
| 5101 | gcgagcgcgc agttaattaa ggcgccctag gccgaccctt agactctgta ctcagttcta |
| 5161 | taaacgagcc attggatacg agatccgtag attgataagg gacacggaat atccccggac |
| 5221 | gcaatagaca ccggtggaca gcttggtatc ctgagcacag tcgcgcgtcc gaatctagct |
| 5281 | ctactttaga ggccccggat tctgatggtc gtagaccgca gaaccgattg gggggatgag |
| 5341 | atctactagt tatcagcaca caattgccca ttatacgcgc gtataatgga ctattgtgtg |
| 5401 | ctgatatagg gataacaggg taattctaga gctagcatat ggatccatcg atttgatgcg |
| 5461 | gtattttctc cttacgcatc tgtgcggtat ttcacaccgc atacgtcaaa gcaaccatag |
| 5521 | tacgcgccct gtagcggcgc attaagcgcg gcgggtgtgg tggttacgcg cagcgtgacc |
| 5581 | gctacacttg ccagcgccct agcgcccgct cctttcgctt tcttcccttc ctttctcgcc |
| 5641 | acgttcgccg gctttccccg tcaagctcta aatcgggggc tccctttagg gttccgattt |
| 5701 | agtgctttac ggcacctcga ccccaaaaaa cttgatttgg gtgatggttc acgtagtggg |
| 5761 | ccatcgccct gatagacggt ttttcgccct ttgacgttgg agtccacgtt ctttaatagt |
| 5821 | ggactcttgt tccaaactgg aacaacactc aactctatct cgggctattc ttttgattta |
| 5881 | taagggattt tgccgatttc ggtctattgg ttaaaaaatg agctgattta acaaaaattt |
| 5941 | aacgcgaatt ttaacaaaat attaacgttt acaattttat ggtgcactct cagtacaatc |
| 6001 | tgctctgatg ccgcatagtt aagccagccc cgacacccgc caacacccgc tgacgcgccc |
| 6061 | tgacgggctt gtctgctccc ggcatccgct tacagacaag ctgtgaccgt ctccgggagc |
| 6121 | tgcatgtgtc agaggttttc accgtcatca ccgaaacgcg cgagacgaaa gggcctcgtg |
| 6181 | atacgcctat ttttataggt taatgtcatg ataataatgg tttcttagac gtcaggtggc |
| 6241 | acttttcggg gaaatgtgcg cggaacccct atttgtttat ttttctaaat acattcaaat |
| 6301 | atgtatccgc tcatgagaca ataaccctga taaatgcttc aataatattg aaaaaggaag |
| 6361 | agtatgagcc atattcaacg ggaaacgtcg aggccgcgat taaattccaa catggatgct |
| 6421 | gatttatatg ggtataaatg ggctcgcgat aatgtcgggc aatcaggtgc gacaatctat |
| 6481 | cgcttgtatg ggaagcccga tgcgccagag ttgtttctga aacatggcaa aggtagcgtt |
| 6541 | gccaatgatg ttacagatga gatggtcaga ctaaactggc tgacggaatt tatgcctctt |
| 6601 | ccgaccatca agcattttat ccgtactcct gatgatgcat ggttactcac cactgcgatc |
| 6661 | cccggaaaaa cagcattcca ggtattagaa gaatatcctg attcaggtga aaatattgtt |
| 6721 | gatgcgctgg cagtgttcct gcgccggttg cattcgattc ctgtttgtaa ttgtcctttt |
| 6781 | aacagcgatc gcgtatttcg tctcgctcag gcgcaatcac gaatgaataa cggtttggtt |
| 6841 | gatgcgagtg attttgatga cgagcgtaat ggctggcctg ttgaacaagt ctggaaagaa |
| 6901 | atgcataaac ttttgccatt ctcaccggat tcagtcgtca ctcatggtga tttctcactt |
| 6961 | gataacctta tttttgacga ggggaaatta ataggttgta ttgatgttgg acgagtcgga |
| 7021 | atcgcagacc gataccagga tcttgccatc ctatggaact gcctcggtga gttttctcct |
| 7081 | tcattacaga aacggctttt tcaaaaatat ggtattgata atcctgatat gaataaattg |
| 7141 | cagtttcatt tgatgctcga tgagtttttc taagcgtata atggtctaga gctagcatat |
| 7201 | ggatccatcg attccattat acgcctgtca gaccaagttt actcatatat actttagatt |
| 7261 | gatttaaaac ttcattttta atttaaaagg atctaggtga agatcctttt tgataatctc |
| 7321 | atgaccaaaa tcccttaacg tgagttttcg ttccactgag cgtcagaccc cgtagaaaag |
| 7381 | atcaaaggat cttcttgaga tccttttttt ctgcgcgtaa tctgctgctt gcaaacaaaa |
| 7441 | aaaccaccgc taccagcggt ggtttgtttg ccggatcaag agctaccaac tctttttccg |
| 7501 | aaggtaactg gcttcagcag agcgcagata ccaaatactg ttcttctagt gtagccgtag |
| 7561 | ttaggccacc acttcaagaa ctctgtagca ccgcctacat acctcgctct gctaatcctg |
| 7621 | ttaccagtgg ctgctgccag tggcgataag tcgtgtctta ccgggttgga ctcaagacga |
| 7681 | tagttaccgg ataaggcgca gcggtcgggc tgaacggggg gttcgtgcac acagcccagc |
| 7741 | ttggagcgaa cgacctacac cgaactgaga tacctacagc gtgagctatg agaaagcgcc |
| 7801 | acgcttcccg aagggagaaa ggcggacagg tatccggtaa gcggcagggt cggaacagga |
| 7861 | gagcgcacga gggagcttcc agggggaaac gcctggtatc tttatagtcc tgtcgggttt |
| 7921 | cgccacctct gacttgagcg tcgatttttg tgatgctcgt caggggggcg gagcctatgg |
| 7981 | aaaaacgcca gcaacgcggc ctttttacgg ttcctggcct tttgctggcc ttttgctcac |
| 8041 | atgt |

| pP074_seq3-201Ig_25-56 deletion (SEQ ID NO: 479) | |
|---|---|
| (SEQ ID NO: 479) | |
| 1 | tctagagcta gcatatggat ccatcgattt agggataaca gggtaattat cagcacacaa |
| 61 | ttgcccatta tacgcgcgta taatggacta ttgtgtgctg atatctgtac acttaagggc |
| 121 | tagatcttag cttacgtcac tagagggtcc acgtttagtt tttaagatcc attgatctcc |
| 181 | taaacgctgc aagattcgca acctggtata cttagcctag gcgctaggtc ctagtgcagc |
| 241 | gggacttttt ttctaaagtc gttgagagga ggagtcgtca gaccagatag ctttgatgtc |
| 301 | ctgatcggaa ggatcgttgg cccccctgca ggcagctgtt aattaactgc gcgctcgctc |
| 361 | gctcactgag gccgcccggg caaagcccgg gcgtcgggcg acctttggtc gcccggcctc |
| 421 | agtgagcgag cgagcgcgca gagagggagt ggccaactcc atcactaggg gttccttgta |
| 481 | gttaatgatt aacccgccat gctacttatc tacggcgcgc cacgcgttct aggagttaat |
| 541 | ttttaaaaag cagtcaaaag tccaagtgcc cttgcgagca tttactctct ctgtttgctc |
| 601 | tggttaataa tctcaggagc acaaacattc cttactagtt ctaggagtta atttttaaaa |
| 661 | agcagtcaaa agtccaagtg cccttgcgag catttactct ctctgtttgc tctggttaat |
| 721 | aatctcagga gcacaaacat tccttactag ttctagagcg gccgccagtg tgctggaatt |
| 781 | cggctttttt agggctggaa gctacctttg acatcatttc ctctgcgaat gcatgtataa |
| 841 | tttctacaga acctattaga aaggatcacc cagcctctgc ttttgtacaa ctttccctta |
| 901 | aaaaactgcc aatcccactg ctgtttggcc caatagtgag aactttttcc tgctgcctct |
| 961 | tggtgctttt gcctatggcc cctattctgc ctgctgaaga cactcttgcc agcatggact |
| 1021 | taaacccctc cagctctgac aatcctcttt ctcttttgtt ttacatgaag ggtctggcag |
| 1081 | ccaaagcaat cactcaaagt tcaaacctta tcattttttg ctttgttcct cttggccttg |
| 1141 | gttttgtaca tcagctttga aaataccatc ccagggttaa tgctggggtt aatttataac |
| 1201 | tgagagtgct ctagttctgc aatacaggac atgctataaa aatggaaaga tgttgctttc |
| 1261 | tgagagatca ggtggattct tgggcatttg cttaagcttg gtaccttttt tatgggagtg |
| 1321 | agacatcctc cttgttctca tagactgctg gctgtgtgtg ctctggtgtc tctggctaca |
| 1381 | gccatggagt ttgggctgag ctgggtcttt ctggtggccc tgctgaaggg agtccagtgt |
| 1441 | gagcagcagg gagcttctag acctggacct agagatgctc aggctcatcc tggaagacct |
| 1501 | agagctgtgc ctacacagtg tgatgtgcct cctaattcta gatttgattg tgctcctgat |
| 1561 | aaggctataa cacaggagca gtgtgaggct agaggatgtt gttatattcc tgctaagcag |
| 1621 | ggactgcagg gagctcagat gggacagcct tggtgttttt ttcctccttc ttatccttct |
| 1681 | tataagctgg agaatctgtc ttcttctgag atgggatata cagctacact gacaagaaca |
| 1741 | acacctacat tttttcctaa ggatattctg acactgagac tggatgtgat gatggagaca |
| 1801 | gagaatagac tgcattttac aattaaggat cctgctaata gaagatatga ggtgcctcta |
| 1861 | gagacaccta gagtgcattc tagagctcct tctcctctgt attctgtgga gttttctgag |
| 1921 | gagccttttg gagtgattgt gcatagacag ctggatggaa gagtgctgct gaatacaaca |
| 1981 | gtggctcctc tgttttttgc tgatcagttt ctgcagctgt ctacatctct gccttctcag |
| 2041 | tatattacag gactggctga gcatctgtct cctctgatgc tgtctacatc ttggacaaga |
| 2101 | attacactgt ggaatagaga tctggctcct acacctggag ctaatctgta tggatctcat |
| 2161 | cctttttatc tggctctgga ggatggagga tctgctcatg gagtgtttct gctgaattct |
| 2221 | aatgctatgg atgtagtgct gcagccttct cctgctctgt cttggagatc tacaggagga |
| 2281 | attctggatg tgtatatttt tctaggacct gagcctaagt ctgtggtgca gcagtatctg |
| 2341 | gatgtagtgg gatatccttt tatgcctcct tattggggac tgggatttca tctgtgtaga |
| 2401 | tggggatatt cttctacagc tattacaaga caggtggttg agaatatgac aagagctcat |
| 2461 | tttcctctgg atgtgcagtg gaatgatcta gattatatgg attctagaag agattttaca |
| 2521 | tttaataagg atggatttag agattttcct gctatggtgc aggagctgca tcagggagga |
| 2581 | agaagatata tgatgattgt ggatcctgct atttcttctt ctggacctgc tggatcttat |
| 2641 | agaccttatg atgagggact gagaagagga gtgtttatta caaatgagac aggacagcct |
| 2701 | ctgattggaa aggtgtggcc tggatctaca gcttttcctg attttacaaa tcctacagct |
| 2761 | ctggcttggt gggaggatat ggtggctgag tttcatgatc aggtgccttt tgatggaatg |
| 2821 | tggattgata tgaatgagcc ttctaatttt ataagaggat ctgaggatgg atgtcctaat |
| 2881 | aatgagctag agaatcctcc ttatgtgcct ggagtagtgg gaggaacact gcaggctgct |
| 2941 | acaatttgtg cttcttctca tcagtttctg tctacacatt ataatctgca taatctgtat |
| 3001 | ggactgacag aggctattgc ttctcataga gctctggtga aggctagagg aacaagacct |
| 3061 | tttgtgattt ctagatctac atttgctgga catggaagat atgctggaca ttggacagga |
| 3121 | gatgtatggt cttcttggga gcagctagct tcttctgtgc ctgagattct gcagtttaat |
| 3181 | ctgctaggag tgcctctggt gggagctgat gtgtgtggat ttctgggaaa tacatctgag |
| 3241 | gagctgtgtg tgagatggac acagctggga gctttttatc cttttatgag aaatcataat |
| 3301 | tctctgctgt ctctgcctca ggagccttat tctttttctg agcctgctca gcaggctatg |
| 3361 | agaaaggctc tgacactgag atatgctctg ctgcctcatc tgtatacact gtttcatcag |
| 3421 | gctcatgtgg ctggagagac agtagctaga cctctgtttc tggagtttcc taaggattct |
| 3481 | tctacatgga cagttgatca tcagctgctg tggggagagg ctctgctgat tacacctgtg |
| 3541 | ctgcaggctg gaaaggctga ggtgacagga tattttcctc tgggaacatg gtatgatctg |
| 3601 | cagacagtgc ctatagaggc tctgggatct ctgcctcctc ctcctgctgc tcctagagag |
| 3661 | cctgctattc attctgaggg acagtgggtg acactgcctg ctcctctgga tacaattaat |
| 3721 | gtgcatctga gagctggata tattattcct ctgcagggac ctggactgac aacaacagag |
| 3781 | tctagacagc agcctatggc tctggctgtg gctctgacaa agggaggaga ggctagagga |
| 3841 | gagctgtttt gggatgatgg agagtctctg gaggtgctgg agagaggagc ttatacacag |
| 3901 | gtgatttttc tggctagaaa taatacaatt gtgaatgagc tggtgagagt gacatctgag |
| 3961 | ggagctggac tgcagctgca gaaggtgaca gtgctgggag tggctacagc tcctcagcag |
| 4021 | gtgctgtcta atggagtgcc tgtgtctaat tttacatatt ctcctgatac aaaggtgctg |
| 4081 | gatatttgtg tgtctctgct gatgggagag cagtttctgg tgtcttggtg ttaatgattt |
| 4141 | aaatctcgag ccgggcggag tgtgttagtc tctccagagg gaggctggtt ccccagggaa |
| 4201 | gcagagcctg tgtgcgggca gcagctgtgt gcgggcctgg gggttgttaa gtgcaattat |
| 4261 | ttttaataaa aggggcattt ggaaaaaaaa aaaaaaggta gcagtcgaca gatgaattct |
| 4321 | gcagatctgt ggcttctagc tgcccgggtg gcatccctgt gacccctccc cagtgcctct |
| 4381 | cctggccctg gaagttgcca ctccagtgcc caccagcctt gtcctaataa aattaagttg |
| 4441 | catcattttg tctgactagg tgtccttcta taatattatg gggtggaggg gggtggtatg |
| 4501 | gagcaagggg caagttggga agacaacctg tagggcctgc ggggtctatt gggaaccaag |
| 4561 | ctggagtgca gtggcacaat cttggctcac tgcaatctcc gcctcctggg ttcaagcgat |
| 4621 | tctcctgcct cagcctcccg agttgttggg attccaggca tgcatgacca ggctcagcta |
| 4681 | atttttgttt ttttggtaga gacggggttt caccatattg gccaggctgg tctccaactc |
| 4741 | ctaatctcag gtgatctacc caccttggcc tcccaaattg ctgggattac aggcgtgaac |
| 4801 | cactgctccc ttccctgtcc ttctgatttt aaaaaaaaga gaaatgttct ggcacctgca |
| 4861 | cttgcactgg ggacagccta ttttgctagt ttgttttgtt tcgttttgtt ttgatggaga |
| 4921 | gcgtatgttg tttaaacgcg gccgcgtaga taagtagcat ggcgggttaa tcattaacta |
| 4981 | caaggaaccc ctagtgatgg agttggccac tccctctctg cgcgctcgct cgctcactga |
| 5041 | ggccgggcga ccaaaggtcg cccgacgccc gggctttgcc cgggcggcct cagtgagcga |
| 5101 | gcgagcgcgc agttaattaa ggcgccctag gccgaccctt agactctgta ctcagttcta |
| 5161 | taaacgagcc attggatacg agatccgtag attgataagg gacacggaat atccccggac |
| 5221 | gcaatagaca ccggtggaca gcttggtatc ctgagcacag tcgcgcgtcc gaatctagct |
| 5281 | ctactttaga ggccccggat tctgatggtc gtagaccgca gaaccgattg gggggatgag |
| 5341 | atctactagt tatcagcaca caattgccca ttatacgcgc gtataatgga ctattgtgtg |
| 5401 | ctgatatagg gataacaggg taattctaga gctagcatat ggatccatcg atttgatgcg |
| 5461 | gtattttctc cttacgcatc tgtgcggtat ttcacaccgc atacgtcaaa gcaaccatag |
| 5521 | tacgcgccct gtagcggcgc attaagcgcg gcgggtgtgg tggttacgcg cagcgtgacc |
| 5581 | gctacacttg ccagcgccct agcgcccgct cctttcgctt tcttcccttc ctttctcgcc |
| 5641 | acgttcgccg gctttccccg tcaagctcta aatcgggggc tccctttagg gttccgattt |
| 5701 | agtgctttac ggcacctcga ccccaaaaaa cttgatttgg gtgatggttc acgtagtggg |
| 5761 | ccatcgccct gatagacggt ttttcgccct ttgacgttgg agtccacgtt ctttaatagt |
| 5821 | ggactcttgt tccaaactgg aacaacactc aactctatct cgggctattc ttttgattta |
| 5881 | taagggattt tgccgatttc ggtctattgg ttaaaaaatg agctgattta acaaaaattt |
| 5941 | aacgcgaatt ttaacaaaat attaacgttt acaattttat ggtgcactct cagtacaatc |
| 6001 | tgctctgatg ccgcatagtt aagccagccc cgacacccgc caacacccgc tgacgcgccc |
| 6061 | tgacgggctt gtctgctccc ggcatccgct tacagacaag ctgtgaccgt ctccgggagc |
| 6121 | tgcatgtgtc agaggttttc accgtcatca ccgaaacgcg cgagacgaaa gggcctcgtg |
| 6181 | atacgcctat ttttataggt taatgtcatg ataataatgg tttcttagac gtcaggtggc |
| 6241 | acttttcggg gaaatgtgcg cggaacccct atttgtttat ttttctaaat acattcaaat |
| 6301 | atgtatccgc tcatgagaca ataaccctga taaatgcttc aataatattg aaaaaggaag |
| 6361 | agtatgagcc atattcaacg ggaaacgtcg aggccgcgat taaattccaa catggatgct |
| 6421 | gatttatatg ggtataaatg ggctcgcgat aatgtcgggc aatcaggtgc gacaatctat |
| 6481 | cgcttgtatg ggaagcccga tgcgccagag ttgtttctga aacatggcaa aggtagcgtt |
| 6541 | gccaatgatg ttacagatga gatggtcaga ctaaactggc tgacggaatt tatgcctctt |
| 6601 | ccgaccatca agcattttat ccgtactcct gatgatgcat ggttactcac cactgcgatc |
| 6661 | cccggaaaaa cagcattcca ggtattagaa gaatatcctg attcaggtga aaatattgtt |
| 6721 | gatgcgctgg cagtgttcct gcgccggttg cattcgattc ctgtttgtaa ttgtcctttt |
| 6781 | aacagcgatc gcgtatttcg tctcgctcag gcgcaatcac gaatgaataa cggtttggtt |
| 6841 | gatgcgagtg attttgatga cgagcgtaat ggctggcctg ttgaacaagt ctggaaagaa |
| 6901 | atgcataaac ttttgccatt ctcaccggat tcagtcgtca ctcatggtga tttctcactt |
| 6961 | gataacctta tttttgacga ggggaaatta ataggttgta ttgatgttgg acgagtcgga |
| 7021 | atcgcagacc gataccagga tcttgccatc ctatggaact gcctcggtga gttttctcct |
| 7081 | tcattacaga aacggctttt tcaaaaatat ggtattgata atcctgatat gaataaattg |
| 7141 | cagtttcatt tgatgctcga tgagtttttc taagcgtata atggtctaga gctagcatat |
| 7201 | ggatccatcg attccattat acgcctgtca gaccaagttt actcatatat actttagatt |
| 7261 | gatttaaaac ttcattttta atttaaaagg atctaggtga agatcctttt tgataatctc |
| 7321 | atgaccaaaa tcccttaacg tgagttttcg ttccactgag cgtcagaccc cgtagaaaag |
| 7381 | atcaaaggat cttcttgaga tccttttttt ctgcgcgtaa tctgctgctt gcaaacaaaa |
| 7441 | aaaccaccgc taccagcggt ggtttgtttg ccggatcaag agctaccaac tctttttccg |
| 7501 | aaggtaactg gcttcagcag agcgcagata ccaaatactg ttcttctagt gtagccgtag |
| 7561 | ttaggccacc acttcaagaa ctctgtagca ccgcctacat acctcgctct gctaatcctg |
| 7621 | ttaccagtgg ctgctgccag tggcgataag tcgtgtctta ccgggttgga ctcaagacga |
| 7681 | tagttaccgg ataaggcgca gcggtcgggc tgaacggggg gttcgtgcac acagcccagc |
| 7741 | ttggagcgaa cgacctacac cgaactgaga tacctacagc gtgagctatg agaaagcgcc |
| 7801 | acgcttcccg aagggagaaa ggcggacagg tatccggtaa gcggcagggt cggaacagga |
| 7861 | gagcgcacga gggagcttcc agggggaaac gcctggtatc tttatagtcc tgtcgggttt |
| 7921 | cgccacctct gacttgagcg tcgatttttg tgatgctcgt caggggggcg gagcctatgg |
| 7981 | aaaaacgcca gcaacgcggc ctttttacgg ttcctggcct tttgctggcc ttttgctcac |
| 8041 | atgt |

| pP075_seq100-IL2wt_newstart | |
|---|---|
| (SEQ ID NO: 480) | |
| 1 | tctagagcta gcatatggat ccatcgattt agggataaca gggtaattat cagcacacaa |
| 61 | ttgcccatta tacgcgcgta taatggacta ttgtgtgctg atatctgtac acttaagggc |
| 121 | tagatcttag cttacgtcac tagagggtcc acgtttagtt tttaagatcc attgatctcc |
| 181 | taaacgctgc aagattcgca acctggtata cttagcctag gcgctaggtc ctagtgcagc |
| 241 | gggacttttt ttctaaagtc gttgagagga ggagtcgtca gaccagatag ctttgatgtc |
| 301 | ctgatcggaa ggatcgttgg cccccctgca ggcagctgtt aattaactgc gcgctcgctc |
| 361 | gctcactgag gccgcccggg caaagcccgg gcgtcgggcg acctttggtc gcccggcctc |
| 421 | agtgagcgag cgagcgcgca gagagggagt ggccaactcc atcactaggg gttccttgta |
| 481 | gttaatgatt aacccgccat gctacttatc tacggcgcgc cacgcgttct aggagttaat |
| 541 | ttttaaaaag cagtcaaaag tccaagtgcc cttgcgagca tttactctct ctgtttgctc |
| 601 | tggttaataa tctcaggagc acaaacattc cttactagtt ctaggagtta atttttaaaa |
| 661 | agcagtcaaa agtccaagtg cccttgcgag catttactct ctctgtttgc tctggttaat |
| 721 | aatctcagga gcacaaacat tccttactag ttctagagcg gccgccagtg tgctggaatt |
| 781 | cggctttttt agggctggaa gctacctttg acatcatttc ctctgcgaat gcatgtataa |
| 841 | tttctacaga acctattaga aaggatcacc cagcctctgc ttttgtacaa ctttccctta |
| 901 | aaaaactgcc aatcccactg ctgtttggcc caatagtgag aactttttcc tgctgcctct |
| 961 | tggtgctttt gcctatggcc cctattctgc ctgctgaaga cactcttgcc agcatggact |
| 1021 | taaacccctc cagctctgac aatcctcttt ctcttttgtt ttacatgaag ggtctggcag |
| 1081 | ccaaagcaat cactcaaagt tcaaacctta tcattttttg ctttgttcct cttggccttg |
| 1141 | gttttgtaca tcagctttga aaataccatc ccagggttaa tgctggggtt aatttataac |
| 1201 | tgagagtgct ctagttctgc aatacaggac atgctataaa aatggaaaga tgttgctttc |
| 1261 | tgagagatca ggtggattct tgggcatttg cttaagcttg gtaccttttt tatgggggtg |
| 1321 | aggcaccctc cctgttctca caggctgctg gctgtgtgtg ctctggtgtc tctggccacc |
| 1381 | atgtacagaa tgcagctgct gtcctgcatt gcactgtcac tggcactggt taccaactca |
| 1441 | cagcaggggg ccagcaggcc aggccccagg gatgcccagg cccaccctgg cagacccagg |
| 1501 | gctgtgccca cccagtgtga tgtgcctccc aacagcagat ttgactgtgc ccctgataag |
| 1561 | gccattactc aggaacagtg tgaggccagg ggctgctgct atatccctgc caagcagggc |
| 1621 | ctgcaggggg cccagatggg gcagccctgg tgcttcttcc cccccagcta cccctcttat |
| 1681 | aagctggaga atctgagcag ctctgaaatg ggctacactg ccactctgac caggactacc |
| 1741 | cccaccttct tccccaagga tattctgact ctgaggctgg atgtgatgat ggagactgag |
| 1801 | aacaggctgc acttcaccat caaggaccct gccaacagga ggtatgaggt gcccctggaa |
| 1861 | actcccaggg tgcactctag ggcccccagc cccctgtatt ctgtggagtt ctctgaggag |
| 1921 | ccttttgggg tcattgtcca caggcagctg gatggcaggg tgctgctgaa tactactgtg |
| 1981 | gcccctctgt tctttgctga ccagttcctg cagctgagca ccagcctgcc ttctcagtac |
| 2041 | attactggcc tggctgagca tctgagcccc ctgatgctga gcacctcttg gaccagaatc |
| 2101 | accctgtgga acagggacct ggctcccact cctggggcca acctgtatgg cagccacccc |
| 2161 | ttctacctgg ccctggagga tgggggctct gcccatgggg tgttcctgct gaacagcaat |
| 2221 | gccatggatg tggtgctgca gccctctcct gccctgtctt ggagatctac tgggggcatc |
| 2281 | ctggatgtgt atatcttcct ggggcctgag cccaagtctg tggtgcagca gtacctggat |
| 2341 | gtggtgggct accccttcat gcccccctac tggggcctgg gcttccacct gtgcaggtgg |
| 2401 | ggctactctt ctactgctat caccaggcag gtggtggaga acatgaccag ggctcacttc |
| 2461 | cctctggatg tgcagtggaa tgacctggac tacatggact ctaggagaga cttcactttt |
| 2521 | aataaggatg ggttcaggga ctttcctgcc atggtgcagg agctgcatca ggggggcagg |
| 2581 | agatatatga tgattgtgga ccctgctatt tctagctctg gccctgctgg cagctatagg |
| 2641 | ccctatgatg aggggctgag gaggggggtg ttcatcacta atgagactgg ccagcccctg |
| 2701 | attggcaagg tgtggcctgg ctctactgcc ttccctgatt tcaccaaccc cactgccctg |
| 2761 | gcctggtggg aggatatggt ggctgagttt catgaccagg tgccctttga tggcatgtgg |
| 2821 | attgacatga atgagcccag caactttatc aggggctctg aagatggctg ccccaacaat |
| 2881 | gagctggaga acccccccta tgtgcctggg gtggtggggg gcaccctgca ggctgccacc |
| 2941 | atctgtgcca gcagccacca gttcctgagc acccactata acctgcacaa cctgtatggc |
| 3001 | ctgactgagg ccattgcctc tcacagggcc ctggtgaagg ctagggggac taggcccttt |
| 3061 | gtgatcagca ggtctacttt tgctggccat ggcaggtatg ctgggcactg gactggggat |
| 3121 | gtgtggtcta gctgggagca gctggccagc tctgtgcctg agatcctgca gtttaatctg |
| 3181 | ctgggggtgc ccctggtggg ggctgatgtg tgtggcttcc tgggcaatac ctctgaggag |
| 3241 | ctgtgtgtga ggtggactca gctgggggct ttctacccct tcatgagaaa ccacaactct |
| 3301 | ctgctgagcc tgccccagga gccctattct ttttctgagc ctgcccagca ggctatgagg |
| 3361 | aaggccctga ctctgaggta tgccctgctg ccccacctgt ataccctgtt ccatcaggcc |
| 3421 | catgtggctg gggagactgt ggccagacct ctgttcctgg agttccccaa ggatagctct |
| 3481 | acttggactg tggaccacca gctgctgtgg ggggaggctc tgctgatcac ccctgtgctg |
| 3541 | caggctggga aggctgaggt gactggctat ttccccctgg gcacctggta tgatctgcag |
| 3601 | actgtgccca ttgaggccct gggctctctg ccccctcccc ctgctgcccc cagggagcct |
| 3661 | gccatccact ctgagggcca gtgggtgacc ctgcctgccc ctctggacac tatcaatgtg |
| 3721 | cacctgaggg ctggctacat catccccctg cagggccctg gcctgactac cactgagtct |
| 3781 | aggcagcagc ccatggccct ggctgtggct ctgaccaagg ggggggaggc caggggggag |
| 3841 | ctgttctggg atgatgggga gtctctggag gtgctggaga ggggggccta cacccaggtg |
| 3901 | atcttcctgg ctaggaataa caccattgtc aatgagctgg tgagggtgac ctctgagggg |
| 3961 | gctggcctgc agctgcagaa ggtgactgtg ctgggggtgg ctactgcccc ccagcaggtg |
| 4021 | ctgagcaatg gggtgcctgt gagcaacttc acctatagcc ctgacaccaa ggtgctggac |
| 4081 | atctgtgtga gcctgctgat gggggagcag ttcctggtga gctggtgcta atttaaatct |
| 4141 | cgagccgggc ggagtgtgtt agtctctcca gagggaggct ggttccccag ggaagcagag |
| 4201 | cctgtgtgcg ggcagcagct gtgtgcgggc ctgggggttg ttaagtgcaa ttatttttaa |
| 4261 | taaaaggggc atttggaaaa aaaaaaaaaa ggtagcagtc gacagatgaa ttctgcagat |
| 4321 | ctgtggcttc tagctgcccg ggtggcatcc ctgtgacccc tccccagtgc ctctcctggc |
| 4381 | cctggaagtt gccactccag tgcccaccag ccttgtccta ataaaattaa gttgcatcat |
| 4441 | tttgtctgac taggtgtcct tctataatat tatggggtgg aggggggtgg tatggagcaa |
| 4501 | ggggcaagtt gggaagacaa cctgtagggc ctgcggggtc tattgggaac caagctggag |
| 4561 | tgcagtggca caatcttggc tcactgcaat ctccgcctcc tgggttcaag cgattctcct |
| 4621 | gcctcagcct cccgagttgt tgggattcca ggcatgcatg accaggctca gctaattttt |
| 4681 | gtttttttgg tagagacggg gtttcaccat attggccagg ctggtctcca actcctaatc |
| 4741 | tcaggtgatc tacccacctt ggcctcccaa attgctggga ttacaggcgt gaaccactgc |
| 4801 | tcccttccct gtccttctga ttttaaaaaa aagagaaatg ttctggcacc tgcacttgca |
| 4861 | ctggggacag cctattttgc tagtttgttt tgtttcgttt tgttttgatg gagagcgtat |
| 4921 | gttgtttaaa cgcggccgcg tagataagta gcatggcggg ttaatcatta actacaagga |
| 4981 | acccctagtg atggagttgg ccactccctc tctgcgcgct cgctcgctca ctgaggccgg |
| 5041 | gcgaccaaag gtcgcccgac gcccgggctt tgcccgggcg gcctcagtga gcgagcgagc |
| 5101 | gcgcagttaa ttaaggcgcc ctaggccgac ccttagactc tgtactcagt tctataaacg |
| 5161 | agccattgga tacgagatcc gtagattgat aagggacacg gaatatcccc ggacgcaata |
| 5221 | gacaccggtg gacagcttgg tatcctgagc acagtcgcgc gtccgaatct agctctactt |
| 5281 | tagaggcccc ggattctgat ggtcgtagac cgcagaaccg attgggggga tgagatctac |
| 5341 | tagttatcag cacacaattg cccattatac gcgcgtataa tggactattg tgtgctgata |
| 5401 | tagggataac agggtaattc tagagctagc atatggatcc atcgatttga tgcggtattt |
| 5461 | tctccttacg catctgtgcg gtatttcaca ccgcatacgt caaagcaacc atagtacgcg |
| 5521 | ccctgtagcg gcgcattaag cgcggcgggt gtggtggtta cgcgcagcgt gaccgctaca |
| 5581 | cttgccagcg ccctagcgcc cgctcctttc gctttcttcc cttcctttct cgccacgttc |
| 5641 | gccggctttc cccgtcaagc tctaaatcgg gggctccctt tagggttccg atttagtgct |
| 5701 | ttacggcacc tcgaccccaa aaaacttgat ttgggtgatg gttcacgtag tgggccatcg |
| 5761 | ccctgataga cggtttttcg ccctttgacg ttggagtcca cgttctttaa tagtggactc |
| 5821 | ttgttccaaa ctggaacaac actcaactct atctcgggct attcttttga tttataaggg |
| 5881 | attttgccga tttcggtcta ttggttaaaa aatgagctga tttaacaaaa atttaacgcg |
| 5941 | aattttaaca aaatattaac gtttacaatt ttatggtgca ctctcagtac aatctgctct |
| 6001 | gatgccgcat agttaagcca gccccgacac ccgccaacac ccgctgacgc gccctgacgg |
| 6061 | gcttgtctgc tcccggcatc cgcttacaga caagctgtga ccgtctccgg gagctgcatg |
| 6121 | tgtcagaggt tttcaccgtc atcaccgaaa cgcgcgagac gaaagggcct cgtgatacgc |
| 6181 | ctatttttat aggttaatgt catgataata atggtttctt agacgtcagg tggcactttt |
| 6241 | cggggaaatg tgcgcggaac ccctatttgt ttatttttct aaatacattc aaatatgtat |
| 6301 | ccgctcatga gacaataacc ctgataaatg cttcaataat attgaaaaag gaagagtatg |
| 6361 | agccatattc aacgggaaac gtcgaggccg cgattaaatt ccaacatgga tgctgattta |
| 6421 | tatgggtata aatgggctcg cgataatgtc gggcaatcag gtgcgacaat ctatcgcttg |
| 6481 | tatgggaagc ccgatgcgcc agagttgttt ctgaaacatg gcaaaggtag cgttgccaat |
| 6541 | gatgttacag atgagatggt cagactaaac tggctgacgg aatttatgcc tcttccgacc |
| 6601 | atcaagcatt ttatccgtac tcctgatgat gcatggttac tcaccactgc gatccccgga |
| 6661 | aaaacagcat tccaggtatt agaagaatat cctgattcag gtgaaaatat tgttgatgcg |
| 6721 | ctggcagtgt tcctgcgccg gttgcattcg attcctgttt gtaattgtcc ttttaacagc |
| 6781 | gatcgcgtat ttcgtctcgc tcaggcgcaa tcacgaatga ataacggttt ggttgatgcg |
| 6841 | agtgattttg atgacgagcg taatggctgg cctgttgaac aagtctggaa agaaatgcat |
| 6901 | aaacttttgc cattctcacc ggattcagtc gtcactcatg gtgatttctc acttgataac |
| 6961 | cttatttttg acgaggggaa attaataggt tgtattgatg ttggacgagt cggaatcgca |
| 7021 | gaccgatacc aggatcttgc catcctatgg aactgcctcg gtgagttttc tccttcatta |
| 7081 | cagaaacggc tttttcaaaa atatggtatt gataatcctg atatgaataa attgcagttt |
| 7141 | catttgatgc tcgatgagtt tttctaagcg tataatggtc tagagctagc atatggatcc |
| 7201 | atcgattcca ttatacgcct gtcagaccaa gtttactcat atatacttta gattgattta |
| 7261 | aaacttcatt tttaatttaa aaggatctag gtgaagatcc tttttgataa tctcatgacc |
| 7321 | aaaatccctt aacgtgagtt ttcgttccac tgagcgtcag accccgtaga aaagatcaaa |
| 7381 | ggatcttctt gagatccttt ttttctgcgc gtaatctgct gcttgcaaac aaaaaaacca |
| 7441 | ccgctaccag cggtggtttg tttgccggat caagagctac caactctttt tccgaaggta |
| 7501 | actggcttca gcagagcgca gataccaaat actgttcttc tagtgtagcc gtagttaggc |
| 7561 | caccacttca agaactctgt agcaccgcct acatacctcg ctctgctaat cctgttacca |
| 7621 | gtggctgctg ccagtggcga taagtcgtgt cttaccgggt tggactcaag acgatagtta |
| 7681 | ccggataagg cgcagcggtc gggctgaacg gggggttcgt gcacacagcc cagcttggag |
| 7741 | cgaacgacct acaccgaact gagataccta cagcgtgagc tatgagaaag cgccacgctt |
| 7801 | cccgaaggga gaaaggcgga caggtatccg gtaagcggca gggtcggaac aggagagcgc |
| 7861 | acgagggagc ttccaggggg aaacgcctgg tatctttata gtcctgtcgg gtttcgccac |
| 7921 | ctctgacttg agcgtcgatt tttgtgatgc tcgtcagggg ggcggagcct atggaaaaac |
| 7981 | gccagcaacg cggccttttt acggttcctg gccttttgct ggccttttgc tcacatgt |

| pP076_seq100-201Ig_newstart (SEQ ID NO: 481) | |
|---|---|
| (SEQ ID NO: 481) | |
| 1 | tctagagcta gcatatggat ccatcgattt agggataaca gggtaattat cagcacacaa |
| 61 | ttgcccatta tacgcgcgta taatggacta ttgtgtgctg atatctgtac acttaagggc |
| 121 | tagatcttag cttacgtcac tagagggtcc acgtttagtt tttaagatcc attgatctcc |
| 181 | taaacgctgc aagattcgca acctggtata cttagcctag gcgctaggtc ctagtgcagc |
| 241 | gggacttttt ttctaaagtc gttgagagga ggagtcgtca gaccagatag ctttgatgtc |
| 301 | ctgatcggaa ggatcgttgg cccccctgca ggcagctgtt aattaactgc gcgctcgctc |
| 361 | gctcactgag gccgcccggg caaagcccgg gcgtcgggcg acctttggtc gcccggcctc |
| 421 | agtgagcgag cgagcgcgca gagagggagt ggccaactcc atcactaggg gttccttgta |
| 481 | gttaatgatt aacccgccat gctacttatc tacggcgcgc cacgcgttct aggagttaat |
| 541 | ttttaaaaag cagtcaaaag tccaagtgcc cttgcgagca tttactctct ctgtttgctc |
| 601 | tggttaataa tctcaggagc acaaacattc cttactagtt ctaggagtta atttttaaaa |
| 661 | agcagtcaaa agtccaagtg cccttgcgag catttactct ctctgtttgc tctggttaat |
| 721 | aatctcagga gcacaaacat tccttactag ttctagagcg gccgccagtg tgctggaatt |
| 781 | cggctttttt agggctggaa gctacctttg acatcatttc ctctgcgaat gcatgtataa |
| 841 | tttctacaga acctattaga aaggatcacc cagcctctgc ttttgtacaa ctttccctta |
| 901 | aaaaactgcc aatcccactg ctgtttggcc caatagtgag aactttttcc tgctgcctct |
| 961 | tggtgctttt gcctatggcc cctattctgc ctgctgaaga cactcttgcc agcatggact |
| 1021 | taaacccctc cagctctgac aatcctcttt ctcttttgtt ttacatgaag ggtctggcag |
| 1081 | ccaaagcaat cactcaaagt tcaaacctta tcattttttg ctttgttcct cttggccttg |
| 1141 | gttttgtaca tcagctttga aaataccatc ccagggttaa tgctggggtt aatttataac |
| 1201 | tgagagtgct ctagttctgc aatacaggac atgctataaa aatggaaaga tgttgctttc |
| 1261 | tgagagatca ggtggattct tgggcatttg cttaagcttg gtaccttttt tatgggggtg |
| 1321 | aggcaccctc cctgttctca caggctgctg gctgtgtgtg ctctggtgtc tctggccacc |
| 1381 | atggagtttg ggctgagctg ggtctttctg gtggccctgc tgaagggagt ccagtgtgag |
| 1441 | cagcaggggg ccagcaggcc aggccccagg gatgcccagg cccaccctgg cagacccagg |
| 1501 | gctgtgccca cccagtgtga tgtgcctccc aacagcagat ttgactgtgc ccctgataag |
| 1561 | gccattactc aggaacagtg tgaggccagg ggctgctgct atatccctgc caagcagggc |
| 1621 | ctgcaggggg cccagatggg gcagccctgg tgcttcttcc cccccagcta cccctcttat |
| 1681 | aagctggaga atctgagcag ctctgaaatg ggctacactg ccactctgac caggactacc |
| 1741 | cccaccttct tccccaagga tattctgact ctgaggctgg atgtgatgat ggagactgag |
| 1801 | aacaggctgc acttcaccat caaggaccct gccaacagga ggtatgaggt gcccctggaa |
| 1861 | actcccaggg tgcactctag ggcccccagc cccctgtatt ctgtggagtt ctctgaggag |
| 1921 | ccttttgggg tcattgtcca caggcagctg gatggcaggg tgctgctgaa tactactgtg |
| 1981 | gcccctctgt tctttgctga ccagttcctg cagctgagca ccagcctgcc ttctcagtac |
| 2041 | attactggcc tggctgagca tctgagcccc ctgatgctga gcacctcttg gaccagaatc |
| 2101 | accctgtgga acagggacct ggctcccact cctggggcca acctgtatgg cagccacccc |
| 2161 | ttctacctgg ccctggagga tgggggctct gcccatgggg tgttcctgct gaacagcaat |
| 2221 | gccatggatg tggtgctgca gccctctcct gccctgtctt ggagatctac tgggggcatc |
| 2281 | ctggatgtgt atatcttcct ggggcctgag cccaagtctg tggtgcagca gtacctggat |
| 2341 | gtggtgggct accccttcat gcccccctac tggggcctgg gcttccacct gtgcaggtgg |
| 2401 | ggctactctt ctactgctat caccaggcag gtggtggaga acatgaccag ggctcacttc |
| 2461 | cctctggatg tgcagtggaa tgacctggac tacatggact ctaggagaga cttcactttt |
| 2521 | aataaggatg ggttcaggga ctttcctgcc atggtgcagg agctgcatca ggggggcagg |
| 2581 | agatatatga tgattgtgga ccctgctatt tctagctctg gccctgctgg cagctatagg |
| 2641 | ccctatgatg aggggctgag gaggggggtg ttcatcacta atgagactgg ccagcccctg |
| 2701 | attggcaagg tgtggcctgg ctctactgcc ttccctgatt tcaccaaccc cactgccctg |
| 2761 | gcctggtggg aggatatggt ggctgagttt catgaccagg tgccctttga tggcatgtgg |
| 2821 | attgacatga atgagcccag caactttatc aggggctctg aagatggctg ccccaacaat |
| 2881 | gagctggaga acccccccta tgtgcctggg gtggtggggg gcaccctgca ggctgccacc |
| 2941 | atctgtgcca gcagccacca gttcctgagc acccactata acctgcacaa cctgtatggc |
| 3001 | ctgactgagg ccattgcctc tcacagggcc ctggtgaagg ctagggggac taggcccttt |
| 3061 | gtgatcagca ggtctacttt tgctggccat ggcaggtatg ctgggcactg gactggggat |
| 3121 | gtgtggtcta gctgggagca gctggccagc tctgtgcctg agatcctgca gtttaatctg |
| 3181 | ctgggggtgc ccctggtggg ggctgatgtg tgtggcttcc tgggcaatac ctctgaggag |
| 3241 | ctgtgtgtga ggtggactca gctgggggct ttctacccct tcatgagaaa ccacaactct |
| 3301 | ctgctgagcc tgccccagga gccctattct ttttctgagc ctgcccagca ggctatgagg |
| 3361 | aaggccctga ctctgaggta tgccctgctg ccccacctgt ataccctgtt ccatcaggcc |
| 3421 | catgtggctg gggagactgt ggccagacct ctgttcctgg agttccccaa ggatagctct |
| 3481 | acttggactg tggaccacca gctgctgtgg ggggaggctc tgctgatcac ccctgtgctg |
| 3541 | caggctggga aggctgaggt gactggctat ttccccctgg gcacctggta tgatctgcag |
| 3601 | actgtgccca ttgaggccct gggctctctg ccccctcccc ctgctgcccc cagggagcct |
| 3661 | gccatccact ctgagggcca gtgggtgacc ctgcctgccc ctctggacac tatcaatgtg |
| 3721 | cacctgaggg ctggctacat catccccctg cagggccctg gcctgactac cactgagtct |
| 3781 | aggcagcagc ccatggccct ggctgtggct ctgaccaagg ggggggaggc caggggggag |
| 3841 | ctgttctggg atgatgggga gtctctggag gtgctggaga ggggggccta cacccaggtg |
| 3901 | atcttcctgg ctaggaataa caccattgtc aatgagctgg tgagggtgac ctctgagggg |
| 3961 | gctggcctgc agctgcagaa ggtgactgtg ctgggggtgg ctactgcccc ccagcaggtg |
| 4021 | ctgagcaatg gggtgcctgt gagcaacttc acctatagcc ctgacaccaa ggtgctggac |
| 4081 | atctgtgtga gcctgctgat gggggagcag ttcctggtga gctggtgcta atttaaatct |
| 4141 | cgagccgggc ggagtgtgtt agtctctcca gagggaggct ggttccccag ggaagcagag |
| 4201 | cctgtgtgcg ggcagcagct gtgtgcgggc ctgggggttg ttaagtgcaa ttatttttaa |
| 4261 | taaaaggggc atttggaaaa aaaaaaaaaa ggtagcagtc gacagatgaa ttctgcagat |
| 4321 | ctgtggcttc tagctgcccg ggtggcatcc ctgtgacccc tccccagtgc ctctcctggc |
| 4381 | cctggaagtt gccactccag tgcccaccag ccttgtccta ataaaattaa gttgcatcat |
| 4441 | tttgtctgac taggtgtcct tctataatat tatggggtgg aggggggtgg tatggagcaa |
| 4501 | ggggcaagtt gggaagacaa cctgtagggc ctgcggggtc tattgggaac caagctggag |
| 4561 | tgcagtggca caatcttggc tcactgcaat ctccgcctcc tgggttcaag cgattctcct |
| 4621 | gcctcagcct cccgagttgt tgggattcca ggcatgcatg accaggctca gctaattttt |
| 4681 | gtttttttgg tagagacggg gtttcaccat attggccagg ctggtctcca actcctaatc |
| 4741 | tcaggtgatc tacccacctt ggcctcccaa attgctggga ttacaggcgt gaaccactgc |
| 4801 | tcccttccct gtccttctga ttttaaaaaa aagagaaatg ttctggcacc tgcacttgca |
| 4861 | ctggggacag cctattttgc tagtttgttt tgtttcgttt tgttttgatg gagagcgtat |
| 4921 | gttgtttaaa cgcggccgcg tagataagta gcatggcggg ttaatcatta actacaagga |
| 4981 | acccctagtg atggagttgg ccactccctc tctgcgcgct cgctcgctca ctgaggccgg |
| 5041 | gcgaccaaag gtcgcccgac gcccgggctt tgcccgggcg gcctcagtga gcgagcgagc |
| 5101 | gcgcagttaa ttaaggcgcc ctaggccgac ccttagactc tgtactcagt tctataaacg |
| 5161 | agccattgga tacgagatcc gtagattgat aagggacacg gaatatcccc ggacgcaata |
| 5221 | gacaccggtg gacagcttgg tatcctgagc acagtcgcgc gtccgaatct agctctactt |
| 5281 | tagaggcccc ggattctgat ggtcgtagac cgcagaaccg attgggggga tgagatctac |
| 5341 | tagttatcag cacacaattg cccattatac gcgcgtataa tggactattg tgtgctgata |
| 5401 | tagggataac agggtaattc tagagctagc atatggatcc atcgatttga tgcggtattt |
| 5461 | tctccttacg catctgtgcg gtatttcaca ccgcatacgt caaagcaacc atagtacgcg |
| 5521 | ccctgtagcg gcgcattaag cgcggcgggt gtggtggtta cgcgcagcgt gaccgctaca |
| 5581 | cttgccagcg ccctagcgcc cgctcctttc gctttcttcc cttcctttct cgccacgttc |
| 5641 | gccggctttc cccgtcaagc tctaaatcgg gggctccctt tagggttccg atttagtgct |
| 5701 | ttacggcacc tcgaccccaa aaaacttgat ttgggtgatg gttcacgtag tgggccatcg |
| 5761 | ccctgataga cggtttttcg ccctttgacg ttggagtcca cgttctttaa tagtggactc |
| 5821 | ttgttccaaa ctggaacaac actcaactct atctcgggct attcttttga tttataaggg |
| 5881 | attttgccga tttcggtcta ttggttaaaa aatgagctga tttaacaaaa atttaacgcg |
| 5941 | aattttaaca aaatattaac gtttacaatt ttatggtgca ctctcagtac aatctgctct |
| 6001 | gatgccgcat agttaagcca gccccgacac ccgccaacac ccgctgacgc gccctgacgg |
| 6061 | gcttgtctgc tcccggcatc cgcttacaga caagctgtga ccgtctccgg gagctgcatg |
| 6121 | tgtcagaggt tttcaccgtc atcaccgaaa cgcgcgagac gaaagggcct cgtgatacgc |
| 6181 | ctatttttat aggttaatgt catgataata atggtttctt agacgtcagg tggcactttt |
| 6241 | cggggaaatg tgcgcggaac ccctatttgt ttatttttct aaatacattc aaatatgtat |
| 6301 | ccgctcatga gacaataacc ctgataaatg cttcaataat attgaaaaag gaagagtatg |
| 6361 | agccatattc aacgggaaac gtcgaggccg cgattaaatt ccaacatgga tgctgattta |
| 6421 | tatgggtata aatgggctcg cgataatgtc gggcaatcag gtgcgacaat ctatcgcttg |
| 6481 | tatgggaagc ccgatgcgcc agagttgttt ctgaaacatg gcaaaggtag cgttgccaat |
| 6541 | gatgttacag atgagatggt cagactaaac tggctgacgg aatttatgcc tcttccgacc |
| 6601 | atcaagcatt ttatccgtac tcctgatgat gcatggttac tcaccactgc gatccccgga |
| 6661 | aaaacagcat tccaggtatt agaagaatat cctgattcag gtgaaaatat tgttgatgcg |
| 6721 | ctggcagtgt tcctgcgccg gttgcattcg attcctgttt gtaattgtcc ttttaacagc |
| 6781 | gatcgcgtat ttcgtctcgc tcaggcgcaa tcacgaatga ataacggttt ggttgatgcg |
| 6841 | agtgattttg atgacgagcg taatggctgg cctgttgaac aagtctggaa agaaatgcat |
| 6901 | aaacttttgc cattctcacc ggattcagtc gtcactcatg gtgatttctc acttgataac |
| 6961 | cttatttttg acgaggggaa attaataggt tgtattgatg ttggacgagt cggaatcgca |
| 7021 | gaccgatacc aggatcttgc catcctatgg aactgcctcg gtgagttttc tccttcatta |
| 7081 | cagaaacggc tttttcaaaa atatggtatt gataatcctg atatgaataa attgcagttt |
| 7141 | catttgatgc tcgatgagtt tttctaagcg tataatggtc tagagctagc atatggatcc |
| 7201 | atcgattcca ttatacgcct gtcagaccaa gtttactcat atatacttta gattgattta |
| 7261 | aaacttcatt tttaatttaa aaggatctag gtgaagatcc tttttgataa tctcatgacc |
| 7321 | aaaatccctt aacgtgagtt ttcgttccac tgagcgtcag accccgtaga aaagatcaaa |
| 7381 | ggatcttctt gagatccttt ttttctgcgc gtaatctgct gcttgcaaac aaaaaaacca |
| 7441 | ccgctaccag cggtggtttg tttgccggat caagagctac caactctttt tccgaaggta |
| 7501 | actggcttca gcagagcgca gataccaaat actgttcttc tagtgtagcc gtagttaggc |
| 7561 | caccacttca agaactctgt agcaccgcct acatacctcg ctctgctaat cctgttacca |
| 7621 | gtggctgctg ccagtggcga taagtcgtgt cttaccgggt tggactcaag acgatagtta |
| 7681 | ccggataagg cgcagcggtc gggctgaacg gggggttcgt gcacacagcc cagcttggag |
| 7741 | cgaacgacct acaccgaact gagataccta cagcgtgagc tatgagaaag cgccacgctt |
| 7801 | cccgaaggga gaaaggcgga caggtatccg gtaagcggca gggtcggaac aggagagcgc |
| 7861 | acgagggagc ttccaggggg aaacgcctgg tatctttata gtcctgtcgg gtttcgccac |
| 7921 | ctctgacttg agcgtcgatt tttgtgatgc tcgtcagggg ggcggagcct atggaaaaac |
| 7981 | gccagcaacg cggccttttt acggttcctg gccttttgct ggccttttgc tcacatgt |

| pP077_seq3-IL2wt_newstart (SEQ ID NO: 482) | |
|---|---|
| (SEQ ID NO: 482) | |
| 1 | tctagagcta gcatatggat ccatcgattt agggataaca gggtaattat cagcacacaa |
| 61 | ttgcccatta tacgcgcgta taatggacta ttgtgtgctg atatctgtac acttaagggc |
| 121 | tagatcttag cttacgtcac tagagggtcc acgtttagtt tttaagatcc attgatctcc |
| 181 | taaacgctgc aagattcgca acctggtata cttagcctag gcgctaggtc ctagtgcagc |
| 241 | gggacttttt ttctaaagtc gttgagagga ggagtcgtca gaccagatag ctttgatgtc |
| 301 | ctgatcggaa ggatcgttgg cccccctgca ggcagctgtt aattaactgc gcgctcgctc |
| 361 | gctcactgag gccgcccggg caaagcccgg gcgtcgggcg acctttggtc gcccggcctc |
| 421 | agtgagcgag cgagcgcgca gagagggagt ggccaactcc atcactaggg gttccttgta |
| 481 | gttaatgatt aacccgccat gctacttatc tacggcgcgc cacgcgttct aggagttaat |
| 541 | ttttaaaaag cagtcaaaag tccaagtgcc cttgcgagca tttactctct ctgtttgctc |
| 601 | tggttaataa tctcaggagc acaaacattc cttactagtt ctaggagtta atttttaaaa |
| 661 | agcagtcaaa agtccaagtg cccttgcgag catttactct ctctgtttgc tctggttaat |
| 721 | aatctcagga gcacaaacat tccttactag ttctagagcg gccgccagtg tgctggaatt |
| 781 | cggctttttt agggctggaa gctacctttg acatcatttc ctctgcgaat gcatgtataa |
| 841 | tttctacaga acctattaga aaggatcacc cagcctctgc ttttgtacaa ctttccctta |
| 901 | aaaaactgcc aatcccactg ctgtttggcc caatagtgag aactttttcc tgctgcctct |
| 961 | tggtgctttt gcctatggcc cctattctgc ctgctgaaga cactcttgcc agcatggact |
| 1021 | taaacccctc cagctctgac aatcctcttt ctcttttgtt ttacatgaag ggtctggcag |
| 1081 | ccaaagcaat cactcaaagt tcaaacctta tcattttttg ctttgttcct cttggccttg |
| 1141 | gttttgtaca tcagctttga aaataccatc ccagggttaa tgctggggtt aatttataac |
| 1201 | tgagagtgct ctagttctgc aatacaggac atgctataaa aatggaaaga tgttgctttc |
| 1261 | tgagagatca ggtggattct tgggcatttg cttaagcttg gtaccttttt tatgggagtg |
| 1321 | agacatcctc cttgttctca tagactgctg gctgtgtgtg ctctggtgtc tctggccacc |
| 1381 | atgtacagaa tgcagctgct gtcctgcatt gcactgtcac tggcactggt taccaactca |
| 1441 | cagcagggag cttctagacc tggacctaga gatgctcagg ctcatcctgg aagacctaga |
| 1501 | gctgtgccta cacagtgtga tgtgcctcct aattctagat ttgattgtgc tcctgataag |
| 1561 | gctataacac aggagcagtg tgaggctaga ggatgttgtt atattcctgc taagcaggga |
| 1621 | ctgcagggag ctcagatggg acagccttgg tgtttttttc ctccttctta tccttcttat |
| 1681 | aagctggaga atctgtcttc ttctgagatg ggatatacag ctacactgac aagaacaaca |
| 1741 | cctacatttt ttcctaagga tattctgaca ctgagactgg atgtgatgat ggagacagag |
| 1801 | aatagactgc attttacaat taaggatcct gctaatagaa gatatgaggt gcctctagag |
| 1861 | acacctagag tgcattctag agctccttct cctctgtatt ctgtggagtt ttctgaggag |
| 1921 | ccttttggag tgattgtgca tagacagctg gatggaagag tgctgctgaa tacaacagtg |
| 1981 | gctcctctgt tttttgctga tcagtttctg cagctgtcta catctctgcc ttctcagtat |
| 2041 | attacaggac tggctgagca tctgtctcct ctgatgctgt ctacatcttg gacaagaatt |
| 2101 | acactgtgga atagagatct ggctcctaca cctggagcta atctgtatgg atctcatcct |
| 2161 | ttttatctgg ctctggagga tggaggatct gctcatggag tgtttctgct gaattctaat |
| 2221 | gctatggatg tagtgctgca gccttctcct gctctgtctt ggagatctac aggaggaatt |
| 2281 | ctggatgtgt atatttttct aggacctgag cctaagtctg tggtgcagca gtatctggat |
| 2341 | gtagtgggat atccttttat gcctccttat tggggactgg gatttcatct gtgtagatgg |
| 2401 | ggatattctt ctacagctat tacaagacag gtggttgaga atatgacaag agctcatttt |
| 2461 | cctctggatg tgcagtggaa tgatctagat tatatggatt ctagaagaga ttttacattt |
| 2521 | aataaggatg gatttagaga ttttcctgct atggtgcagg agctgcatca gggaggaaga |
| 2581 | agatatatga tgattgtgga tcctgctatt tcttcttctg gacctgctgg atcttataga |
| 2641 | ccttatgatg agggactgag aagaggagtg tttattacaa atgagacagg acagcctctg |
| 2701 | attggaaagg tgtggcctgg atctacagct tttcctgatt ttacaaatcc tacagctctg |
| 2761 | gcttggtggg aggatatggt ggctgagttt catgatcagg tgccttttga tggaatgtgg |
| 2821 | attgatatga atgagccttc taattttata agaggatctg aggatggatg tcctaataat |
| 2881 | gagctagaga atcctcctta tgtgcctgga gtagtgggag gaacactgca ggctgctaca |
| 2941 | atttgtgctt cttctcatca gtttctgtct acacattata atctgcataa tctgtatgga |
| 3001 | ctgacagagg ctattgcttc tcatagagct ctggtgaagg ctagaggaac aagacctttt |
| 3061 | gtgatttcta gatctacatt tgctggacat ggaagatatg ctggacattg gacaggagat |
| 3121 | gtatggtctt cttgggagca gctagcttct tctgtgcctg agattctgca gtttaatctg |
| 3181 | ctaggagtgc ctctggtggg agctgatgtg tgtggatttc tgggaaatac atctgaggag |
| 3241 | ctgtgtgtga gatggacaca gctgggagct ttttatcctt ttatgagaaa tcataattct |
| 3301 | ctgctgtctc tgcctcagga gccttattct ttttctgagc ctgctcagca ggctatgaga |
| 3361 | aaggctctga cactgagata tgctctgctg cctcatctgt atacactgtt tcatcaggct |
| 3421 | catgtggctg gagagacagt agctagacct ctgtttctgg agtttcctaa ggattcttct |
| 3481 | acatggacag ttgatcatca gctgctgtgg ggagaggctc tgctgattac acctgtgctg |
| 3541 | caggctggaa aggctgaggt gacaggatat tttcctctgg gaacatggta tgatctgcag |
| 3601 | acagtgccta tagaggctct gggatctctg cctcctcctc ctgctgctcc tagagagcct |
| 3661 | gctattcatt ctgagggaca gtgggtgaca ctgcctgctc ctctggatac aattaatgtg |
| 3721 | catctgagag ctggatatat tattcctctg cagggacctg gactgacaac aacagagtct |
| 3781 | agacagcagc ctatggctct ggctgtggct ctgacaaagg gaggagaggc tagaggagag |
| 3841 | ctgttttggg atgatggaga gtctctggag gtgctggaga gaggagctta tacacaggtg |
| 3901 | atttttctgg ctagaaataa tacaattgtg aatgagctgg tgagagtgac atctgaggga |
| 3961 | gctggactgc agctgcagaa ggtgacagtg ctgggagtgg ctacagctcc tcagcaggtg |
| 4021 | ctgtctaatg gagtgcctgt gtctaatttt acatattctc ctgatacaaa ggtgctggat |
| 4081 | atttgtgtgt ctctgctgat gggagagcag tttctggtgt cttggtgtta atgatttaaa |
| 4141 | tctcgagccg ggcggagtgt gttagtctct ccagagggag gctggttccc cagggaagca |
| 4201 | gagcctgtgt gcgggcagca gctgtgtgcg ggcctggggg ttgttaagtg caattatttt |
| 4261 | taataaaagg ggcatttgga aaaaaaaaaa aaaggtagca gtcgacagat gaattctgca |
| 4321 | gatctgtggc ttctagctgc ccgggtggca tccctgtgac ccctccccag tgcctctcct |
| 4381 | ggccctggaa gttgccactc cagtgcccac cagccttgtc ctaataaaat taagttgcat |
| 4441 | cattttgtct gactaggtgt ccttctataa tattatgggg tggagggggg tggtatggag |
| 4501 | caaggggcaa gttgggaaga caacctgtag ggcctgcggg gtctattggg aaccaagctg |
| 4561 | gagtgcagtg gcacaatctt ggctcactgc aatctccgcc tcctgggttc aagcgattct |
| 4621 | cctgcctcag cctcccgagt tgttgggatt ccaggcatgc atgaccaggc tcagctaatt |
| 4681 | tttgtttttt tggtagagac ggggtttcac catattggcc aggctggtct ccaactccta |
| 4741 | atctcaggtg atctacccac cttggcctcc caaattgctg ggattacagg cgtgaaccac |
| 4801 | tgctcccttc cctgtccttc tgattttaaa aaaaagagaa atgttctggc acctgcactt |
| 4861 | gcactgggga cagcctattt tgctagtttg ttttgtttcg ttttgttttg atggagagcg |
| 4921 | tatgttgttt aaacgcggcc gcgtagataa gtagcatggc gggttaatca ttaactacaa |
| 4981 | ggaaccccta gtgatggagt tggccactcc ctctctgcgc gctcgctcgc tcactgaggc |
| 5041 | cgggcgacca aaggtcgccc gacgcccggg ctttgcccgg gcggcctcag tgagcgagcg |
| 5101 | agcgcgcagt taattaaggc gccctaggcc gacccttaga ctctgtactc agttctataa |
| 5161 | acgagccatt ggatacgaga tccgtagatt gataagggac acggaatatc cccggacgca |
| 5221 | atagacaccg gtggacagct tggtatcctg agcacagtcg cgcgtccgaa tctagctcta |
| 5281 | ctttagaggc cccggattct gatggtcgta gaccgcagaa ccgattgggg ggatgagatc |
| 5341 | tactagttat cagcacacaa ttgcccatta tacgcgcgta taatggacta ttgtgtgctg |
| 5401 | atatagggat aacagggtaa ttctagagct agcatatgga tccatcgatt tgatgcggta |
| 5461 | ttttctcctt acgcatctgt gcggtatttc acaccgcata cgtcaaagca accatagtac |
| 5521 | gcgccctgta gcggcgcatt aagcgcggcg ggtgtggtgg ttacgcgcag cgtgaccgct |
| 5581 | acacttgcca gcgccctagc gcccgctcct ttcgctttct tcccttcctt tctcgccacg |
| 5641 | ttcgccggct ttccccgtca agctctaaat cgggggctcc ctttagggtt ccgatttagt |
| 5701 | gctttacggc acctcgaccc caaaaaactt gatttgggtg atggttcacg tagtgggcca |
| 5761 | tcgccctgat agacggtttt tcgccctttg acgttggagt ccacgttctt taatagtgga |
| 5821 | ctcttgttcc aaactggaac aacactcaac tctatctcgg gctattcttt tgatttataa |
| 5881 | gggattttgc cgatttcggt ctattggtta aaaaatgagc tgatttaaca aaaatttaac |
| 5941 | gcgaatttta acaaaatatt aacgtttaca attttatggt gcactctcag tacaatctgc |
| 6001 | tctgatgccg catagttaag ccagccccga cacccgccaa cacccgctga cgcgccctga |
| 6061 | cgggcttgtc tgctcccggc atccgcttac agacaagctg tgaccgtctc cgggagctgc |
| 6121 | atgtgtcaga ggttttcacc gtcatcaccg aaacgcgcga gacgaaaggg cctcgtgata |
| 6181 | cgcctatttt tataggttaa tgtcatgata ataatggttt cttagacgtc aggtggcact |
| 6241 | tttcggggaa atgtgcgcgg aacccctatt tgtttatttt tctaaataca ttcaaatatg |
| 6301 | tatccgctca tgagacaata accctgataa atgcttcaat aatattgaaa aaggaagagt |
| 6361 | atgagccata ttcaacggga aacgtcgagg ccgcgattaa attccaacat ggatgctgat |
| 6421 | ttatatgggt ataaatgggc tcgcgataat gtcgggcaat caggtgcgac aatctatcgc |
| 6481 | ttgtatggga agcccgatgc gccagagttg tttctgaaac atggcaaagg tagcgttgcc |
| 6541 | aatgatgtta cagatgagat ggtcagacta aactggctga cggaatttat gcctcttccg |
| 6601 | accatcaagc attttatccg tactcctgat gatgcatggt tactcaccac tgcgatcccc |
| 6661 | ggaaaaacag cattccaggt attagaagaa tatcctgatt caggtgaaaa tattgttgat |
| 6721 | gcgctggcag tgttcctgcg ccggttgcat tcgattcctg tttgtaattg tccttttaac |
| 6781 | agcgatcgcg tatttcgtct cgctcaggcg caatcacgaa tgaataacgg tttggttgat |
| 6841 | gcgagtgatt ttgatgacga gcgtaatggc tggcctgttg aacaagtctg gaaagaaatg |
| 6901 | cataaacttt tgccattctc accggattca gtcgtcactc atggtgattt ctcacttgat |
| 6961 | aaccttattt ttgacgaggg gaaattaata ggttgtattg atgttggacg agtcggaatc |
| 7021 | gcagaccgat accaggatct tgccatccta tggaactgcc tcggtgagtt ttctccttca |
| 7081 | ttacagaaac ggctttttca aaaatatggt attgataatc ctgatatgaa taaattgcag |
| 7141 | tttcatttga tgctcgatga gtttttctaa gcgtataatg gtctagagct agcatatgga |
| 7201 | tccatcgatt ccattatacg cctgtcagac caagtttact catatatact ttagattgat |
| 7261 | ttaaaacttc atttttaatt taaaaggatc taggtgaaga tcctttttga taatctcatg |
| 7321 | accaaaatcc cttaacgtga gttttcgttc cactgagcgt cagaccccgt agaaaagatc |
| 7381 | aaaggatctt cttgagatcc tttttttctg cgcgtaatct gctgcttgca aacaaaaaaa |
| 7441 | ccaccgctac cagcggtggt ttgtttgccg gatcaagagc taccaactct ttttccgaag |
| 7501 | gtaactggct tcagcagagc gcagatacca aatactgttc ttctagtgta gccgtagtta |
| 7561 | ggccaccact tcaagaactc tgtagcaccg cctacatacc tcgctctgct aatcctgtta |
| 7621 | ccagtggctg ctgccagtgg cgataagtcg tgtcttaccg ggttggactc aagacgatag |
| 7681 | ttaccggata aggcgcagcg gtcgggctga acggggggtt cgtgcacaca gcccagcttg |
| 7741 | gagcgaacga cctacaccga actgagatac ctacagcgtg agctatgaga aagcgccacg |
| 7801 | cttcccgaag ggagaaaggc ggacaggtat ccggtaagcg gcagggtcgg aacaggagag |
| 7861 | cgcacgaggg agcttccagg gggaaacgcc tggtatcttt atagtcctgt cgggtttcgc |
| 7921 | cacctctgac ttgagcgtcg atttttgtga tgctcgtcag gggggcggag cctatggaaa |
| 7981 | aacgccagca acgcggcctt tttacggttc ctggcctttt gctggccttt tgctcacatg |
| 8041 | t |

| pP078_seq3-201Ig_newstart | |
|---|---|
| (SEQ ID NO: 483) | |
| 1 | tctagagcta gcatatggat ccatcgattt agggataaca gggtaattat cagcacacaa |
| 61 | ttgcccatta tacgcgcgta taatggacta ttgtgtgctg atatctgtac acttaagggc |
| 121 | tagatcttag cttacgtcac tagagggtcc acgtttagtt tttaagatcc attgatctcc |
| 181 | taaacgctgc aagattcgca acctggtata cttagcctag gcgctaggtc ctagtgcagc |
| 241 | gggacttttt ttctaaagtc gttgagagga ggagtcgtca gaccagatag ctttgatgtc |
| 301 | ctgatcggaa ggatcgttgg cccccctgca ggcagctgtt aattaactgc gcgctcgctc |
| 361 | gctcactgag gccgcccggg caaagcccgg gcgtcgggcg acctttggtc gcccggcctc |
| 421 | agtgagcgag cgagcgcgca gagagggagt ggccaactcc atcactaggg gttccttgta |
| 481 | gttaatgatt aacccgccat gctacttatc tacggcgcgc cacgcgttct aggagttaat |
| 541 | ttttaaaaag cagtcaaaag tccaagtgcc cttgcgagca tttactctct ctgtttgctc |
| 601 | tggttaataa tctcaggagc acaaacattc cttactagtt ctaggagtta atttttaaaa |
| 661 | agcagtcaaa agtccaagtg cccttgcgag catttactct ctctgtttgc tctggttaat |
| 721 | aatctcagga gcacaaacat tccttactag ttctagagcg gccgccagtg tgctggaatt |
| 781 | cggctttttt agggctggaa gctacctttg acatcatttc ctctgcgaat gcatgtataa |
| 841 | tttctacaga acctattaga aaggatcacc cagcctctgc ttttgtacaa ctttccctta |
| 901 | aaaaactgcc aatcccactg ctgtttggcc caatagtgag aactttttcc tgctgcctct |
| 961 | tggtgctttt gcctatggcc cctattctgc ctgctgaaga cactcttgcc agcatggact |
| 1021 | taaacccctc cagctctgac aatcctcttt ctcttttgtt ttacatgaag ggtctggcag |
| 1081 | ccaaagcaat cactcaaagt tcaaacctta tcattttttg ctttgttcct cttggccttg |
| 1141 | gttttgtaca tcagctttga aaataccatc ccagggttaa tgctggggtt aatttataac |
| 1201 | tgagagtgct ctagttctgc aatacaggac atgctataaa aatggaaaga tgttgctttc |
| 1261 | tgagagatca ggtggattct tgggcatttg cttaagcttg gtaccttttt tatgggagtg |
| 1321 | agacatcctc cttgttctca tagactgctg gctgtgtgtg ctctggtgtc tctggccacc |
| 1381 | atggagtttg ggctgagctg ggtctttctg gtggccctgc tgaagggagt ccagtgtgag |
| 1441 | cagcagggag cttctagacc tggacctaga gatgctcagg ctcatcctgg aagacctaga |
| 1501 | gctgtgccta cacagtgtga tgtgcctcct aattctagat ttgattgtgc tcctgataag |
| 1561 | gctataacac aggagcagtg tgaggctaga ggatgttgtt atattcctgc taagcaggga |
| 1621 | ctgcagggag ctcagatggg acagccttgg tgtttttttc ctccttctta tccttcttat |
| 1681 | aagctggaga atctgtcttc ttctgagatg ggatatacag ctacactgac aagaacaaca |
| 1741 | cctacatttt ttcctaagga tattctgaca ctgagactgg atgtgatgat ggagacagag |
| 1801 | aatagactgc attttacaat taaggatcct gctaatagaa gatatgaggt gcctctagag |
| 1861 | acacctagag tgcattctag agctccttct cctctgtatt ctgtggagtt ttctgaggag |
| 1921 | ccttttggag tgattgtgca tagacagctg gatggaagag tgctgctgaa tacaacagtg |
| 1981 | gctcctctgt tttttgctga tcagtttctg cagctgtcta catctctgcc ttctcagtat |
| 2041 | attacaggac tggctgagca tctgtctcct ctgatgctgt ctacatcttg gacaagaatt |
| 2101 | acactgtgga atagagatct ggctcctaca cctggagcta atctgtatgg atctcatcct |
| 2161 | ttttatctgg ctctggagga tggaggatct gctcatggag tgtttctgct gaattctaat |
| 2221 | gctatggatg tagtgctgca gccttctcct gctctgtctt ggagatctac aggaggaatt |
| 2281 | ctggatgtgt atatttttct aggacctgag cctaagtctg tggtgcagca gtatctggat |
| 2341 | gtagtgggat atccttttat gcctccttat tggggactgg gatttcatct gtgtagatgg |
| 2401 | ggatattctt ctacagctat tacaagacag gtggttgaga atatgacaag agctcatttt |
| 2461 | cctctggatg tgcagtggaa tgatctagat tatatggatt ctagaagaga ttttacattt |
| 2521 | aataaggatg gatttagaga ttttcctgct atggtgcagg agctgcatca gggaggaaga |
| 2581 | agatatatga tgattgtgga tcctgctatt tcttcttctg gacctgctgg atcttataga |
| 2641 | ccttatgatg agggactgag aagaggagtg tttattacaa atgagacagg acagcctctg |
| 2701 | attggaaagg tgtggcctgg atctacagct tttcctgatt ttacaaatcc tacagctctg |
| 2761 | gcttggtggg aggatatggt ggctgagttt catgatcagg tgccttttga tggaatgtgg |
| 2821 | attgatatga atgagccttc taattttata agaggatctg aggatggatg tcctaataat |
| 2881 | gagctagaga atcctcctta tgtgcctgga gtagtgggag gaacactgca ggctgctaca |
| 2941 | atttgtgctt cttctcatca gtttctgtct acacattata atctgcataa tctgtatgga |
| 3001 | ctgacagagg ctattgcttc tcatagagct ctggtgaagg ctagaggaac aagacctttt |
| 3061 | gtgatttcta gatctacatt tgctggacat ggaagatatg ctggacattg gacaggagat |
| 3121 | gtatggtctt cttgggagca gctagcttct tctgtgcctg agattctgca gtttaatctg |
| 3181 | ctaggagtgc ctctggtggg agctgatgtg tgtggatttc tgggaaatac atctgaggag |
| 3241 | ctgtgtgtga gatggacaca gctgggagct ttttatcctt ttatgagaaa tcataattct |
| 3301 | ctgctgtctc tgcctcagga gccttattct ttttctgagc ctgctcagca ggctatgaga |
| 3361 | aaggctctga cactgagata tgctctgctg cctcatctgt atacactgtt tcatcaggct |
| 3421 | catgtggctg gagagacagt agctagacct ctgtttctgg agtttcctaa ggattcttct |
| 3481 | acatggacag ttgatcatca gctgctgtgg ggagaggctc tgctgattac acctgtgctg |
| 3541 | caggctggaa aggctgaggt gacaggatat tttcctctgg gaacatggta tgatctgcag |
| 3601 | acagtgccta tagaggctct gggatctctg cctcctcctc ctgctgctcc tagagagcct |
| 3661 | gctattcatt ctgagggaca gtgggtgaca ctgcctgctc ctctggatac aattaatgtg |
| 3721 | catctgagag ctggatatat tattcctctg cagggacctg gactgacaac aacagagtct |
| 3781 | agacagcagc ctatggctct ggctgtggct ctgacaaagg gaggagaggc tagaggagag |
| 3841 | ctgttttggg atgatggaga gtctctggag gtgctggaga gaggagctta tacacaggtg |
| 3901 | atttttctgg ctagaaataa tacaattgtg aatgagctgg tgagagtgac atctgaggga |
| 3961 | gctggactgc agctgcagaa ggtgacagtg ctgggagtgg ctacagctcc tcagcaggtg |
| 4021 | ctgtctaatg gagtgcctgt gtctaatttt acatattctc ctgatacaaa ggtgctggat |
| 4081 | atttgtgtgt ctctgctgat gggagagcag tttctggtgt cttggtgtta atgatttaaa |
| 4141 | tctcgagccg ggcggagtgt gttagtctct ccagagggag gctggttccc cagggaagca |
| 4201 | gagcctgtgt gcgggcagca gctgtgtgcg ggcctggggg ttgttaagtg caattatttt |
| 4261 | taataaaagg ggcatttgga aaaaaaaaaa aaaggtagca gtcgacagat gaattctgca |
| 4321 | gatctgtggc ttctagctgc ccgggtggca tccctgtgac ccctccccag tgcctctcct |
| 4381 | ggccctggaa gttgccactc cagtgcccac cagccttgtc ctaataaaat taagttgcat |
| 4441 | cattttgtct gactaggtgt ccttctataa tattatgggg tggagggggg tggtatggag |
| 4501 | caaggggcaa gttgggaaga caacctgtag ggcctgcggg gtctattggg aaccaagctg |
| 4561 | gagtgcagtg gcacaatctt ggctcactgc aatctccgcc tcctgggttc aagcgattct |
| 4621 | cctgcctcag cctcccgagt tgttgggatt ccaggcatgc atgaccaggc tcagctaatt |
| 4681 | tttgtttttt tggtagagac ggggtttcac catattggcc aggctggtct ccaactccta |
| 4741 | atctcaggtg atctacccac cttggcctcc caaattgctg ggattacagg cgtgaaccac |
| 4801 | tgctcccttc cctgtccttc tgattttaaa aaaaagagaa atgttctggc acctgcactt |
| 4861 | gcactgggga cagcctattt tgctagtttg ttttgtttcg ttttgttttg atggagagcg |
| 4921 | tatgttgttt aaacgcggcc gcgtagataa gtagcatggc gggttaatca ttaactacaa |
| 4981 | ggaaccccta gtgatggagt tggccactcc ctctctgcgc gctcgctcgc tcactgaggc |
| 5041 | cgggcgacca aaggtcgccc gacgcccggg ctttgcccgg gcggcctcag tgagcgagcg |
| 5101 | agcgcgcagt taattaaggc gccctaggcc gacccttaga ctctgtactc agttctataa |
| 5161 | acgagccatt ggatacgaga tccgtagatt gataagggac acggaatatc cccggacgca |
| 5221 | atagacaccg gtggacagct tggtatcctg agcacagtcg cgcgtccgaa tctagctcta |
| 5281 | ctttagaggc cccggattct gatggtcgta gaccgcagaa ccgattgggg ggatgagatc |
| 5341 | tactagttat cagcacacaa ttgcccatta tacgcgcgta taatggacta ttgtgtgctg |
| 5401 | atatagggat aacagggtaa ttctagagct agcatatgga tccatcgatt tgatgcggta |
| 5461 | ttttctcctt acgcatctgt gcggtatttc acaccgcata cgtcaaagca accatagtac |
| 5521 | gcgccctgta gcggcgcatt aagcgcggcg ggtgtggtgg ttacgcgcag cgtgaccgct |
| 5581 | acacttgcca gcgccctagc gcccgctcct ttcgctttct tcccttcctt tctcgccacg |
| 5641 | ttcgccggct ttccccgtca agctctaaat cgggggctcc ctttagggtt ccgatttagt |
| 5701 | gctttacggc acctcgaccc caaaaaactt gatttgggtg atggttcacg tagtgggcca |
| 5761 | tcgccctgat agacggtttt tcgccctttg acgttggagt ccacgttctt taatagtgga |
| 5821 | ctcttgttcc aaactggaac aacactcaac tctatctcgg gctattcttt tgatttataa |
| 5881 | gggattttgc cgatttcggt ctattggtta aaaaatgagc tgatttaaca aaaatttaac |
| 5941 | gcgaatttta acaaaatatt aacgtttaca attttatggt gcactctcag tacaatctgc |
| 6001 | tctgatgccg catagttaag ccagccccga cacccgccaa cacccgctga cgcgccctga |
| 6061 | cgggcttgtc tgctcccggc atccgcttac agacaagctg tgaccgtctc cgggagctgc |
| 6121 | atgtgtcaga ggttttcacc gtcatcaccg aaacgcgcga gacgaaaggg cctcgtgata |
| 6181 | cgcctatttt tataggttaa tgtcatgata ataatggttt cttagacgtc aggtggcact |
| 6241 | tttcggggaa atgtgcgcgg aacccctatt tgtttatttt tctaaataca ttcaaatatg |
| 6301 | tatccgctca tgagacaata accctgataa atgcttcaat aatattgaaa aaggaagagt |
| 6361 | atgagccata ttcaacggga aacgtcgagg ccgcgattaa attccaacat ggatgctgat |
| 6421 | ttatatgggt ataaatgggc tcgcgataat gtcgggcaat caggtgcgac aatctatcgc |
| 6481 | ttgtatggga agcccgatgc gccagagttg tttctgaaac atggcaaagg tagcgttgcc |
| 6541 | aatgatgtta cagatgagat ggtcagacta aactggctga cggaatttat gcctcttccg |
| 6601 | accatcaagc attttatccg tactcctgat gatgcatggt tactcaccac tgcgatcccc |
| 6661 | ggaaaaacag cattccaggt attagaagaa tatcctgatt caggtgaaaa tattgttgat |
| 6721 | gcgctggcag tgttcctgcg ccggttgcat tcgattcctg tttgtaattg tccttttaac |
| 6781 | agcgatcgcg tatttcgtct cgctcaggcg caatcacgaa tgaataacgg tttggttgat |
| 6841 | gcgagtgatt ttgatgacga gcgtaatggc tggcctgttg aacaagtctg gaaagaaatg |
| 6901 | cataaacttt tgccattctc accggattca gtcgtcactc atggtgattt ctcacttgat |
| 6961 | aaccttattt ttgacgaggg gaaattaata ggttgtattg atgttggacg agtcggaatc |
| 7021 | gcagaccgat accaggatct tgccatccta tggaactgcc tcggtgagtt ttctccttca |
| 7081 | ttacagaaac ggctttttca aaaatatggt attgataatc ctgatatgaa taaattgcag |
| 7141 | tttcatttga tgctcgatga gtttttctaa gcgtataatg gtctagagct agcatatgga |
| 7201 | tccatcgatt ccattatacg cctgtcagac caagtttact catatatact ttagattgat |
| 7261 | ttaaaacttc atttttaatt taaaaggatc taggtgaaga tcctttttga taatctcatg |
| 7321 | accaaaatcc cttaacgtga gttttcgttc cactgagcgt cagaccccgt agaaaagatc |
| 7381 | aaaggatctt cttgagatcc tttttttctg cgcgtaatct gctgcttgca aacaaaaaaa |
| 7441 | ccaccgctac cagcggtggt ttgtttgccg gatcaagagc taccaactct ttttccgaag |
| 7501 | gtaactggct tcagcagagc gcagatacca aatactgttc ttctagtgta gccgtagtta |
| 7561 | ggccaccact tcaagaactc tgtagcaccg cctacatacc tcgctctgct aatcctgtta |
| 7621 | ccagtggctg ctgccagtgg cgataagtcg tgtcttaccg ggttggactc aagacgatag |
| 7681 | ttaccggata aggcgcagcg gtcgggctga acggggggtt cgtgcacaca gcccagcttg |
| 7741 | gagcgaacga cctacaccga actgagatac ctacagcgtg agctatgaga aagcgccacg |
| 7801 | cttcccgaag ggagaaaggc ggacaggtat ccggtaagcg gcagggtcgg aacaggagag |
| 7861 | cgcacgaggg agcttccagg gggaaacgcc tggtatcttt atagtcctgt cgggtttcgc |
| 7921 | cacctctgac ttgagcgtcg atttttgtga tgctcgtcag gggggcggag cctatggaaa |
| 7981 | aacgccagca acgcggcctt tttacggttc ctggcctttt gctggccttt tgctcacatg |
| 8041 | t |

| pP079_seq100-IL2wt_3-56 deletion (SEQ ID NO: 484) | |
|---|---|
| (SEQ ID NO: 484) | |
| 1 | tctagagcta gcatatggat ccatcgattt agggataaca gggtaattat cagcacacaa |
| 61 | ttgcccatta tacgcgcgta taatggacta ttgtgtgctg atatctgtac acttaagggc |
| 121 | tagatcttag cttacgtcac tagagggtcc acgtttagtt tttaagatcc attgatctcc |
| 181 | taaacgctgc aagattcgca acctggtata cttagcctag gcgctaggtc ctagtgcagc |
| 241 | gggacttttt ttctaaagtc gttgagagga ggagtcgtca gaccagatag ctttgatgtc |
| 301 | ctgatcggaa ggatcgttgg cccccctgca ggcagctgtt aattaactgc gcgctcgctc |
| 361 | gctcactgag gccgcccggg caaagcccgg gcgtcgggcg acctttggtc gcccggcctc |
| 421 | agtgagcgag cgagcgcgca gagagggagt ggccaactcc atcactaggg gttccttgta |
| 481 | gttaatgatt aacccgccat gctacttatc tacggcgcgc cacgcgttct aggagttaat |
| 541 | ttttaaaaag cagtcaaaag tccaagtgcc cttgcgagca tttactctct ctgtttgctc |
| 601 | tggttaataa tctcaggagc acaaacattc cttactagtt ctaggagtta atttttaaaa |
| 661 | agcagtcaaa agtccaagtg cccttgcgag catttactct ctctgtttgc tctggttaat |
| 721 | aatctcagga gcacaaacat tccttactag ttctagagcg gccgccagtg tgctggaatt |
| 781 | cggctttttt agggctggaa gctacctttg acatcatttc ctctgcgaat gcatgtataa |
| 841 | tttctacaga acctattaga aaggatcacc cagcctctgc ttttgtacaa ctttccctta |
| 901 | aaaaactgcc aatcccactg ctgtttggcc caatagtgag aactttttcc tgctgcctct |
| 961 | tggtgctttt gcctatggcc cctattctgc ctgctgaaga cactcttgcc agcatggact |
| 1021 | taaacccctc cagctctgac aatcctcttt ctcttttgtt ttacatgaag ggtctggcag |
| 1081 | ccaaagcaat cactcaaagt tcaaacctta tcattttttg ctttgttcct cttggccttg |
| 1141 | gttttgtaca tcagctttga aaataccatc ccagggttaa tgctggggtt aatttataac |
| 1201 | tgagagtgct ctagttctgc aatacaggac atgctataaa aatggaaaga tgttgctttc |
| 1261 | tgagagatca ggtggattct tgggcatttg cttaagcttg gtaccgccac catggggtac |
| 1321 | agaatgcagc tgctgtcctg cattgcactg tcactggcac tggttaccaa ctcacagcag |
| 1381 | ggggccagca ggccaggccc cagggatgcc caggcccacc ctggcagacc cagggctgtg |
| 1441 | cccacccagt gtgatgtgcc tcccaacagc agatttgact gtgcccctga taaggccatt |
| 1501 | actcaggaac agtgtgaggc caggggctgc tgctatatcc ctgccaagca gggcctgcag |
| 1561 | ggggcccaga tggggcagcc ctggtgcttc ttccccccca gctacccctc ttataagctg |
| 1621 | gagaatctga gcagctctga aatgggctac actgccactc tgaccaggac tacccccacc |
| 1681 | ttcttcccca aggatattct gactctgagg ctggatgtga tgatggagac tgagaacagg |
| 1741 | ctgcacttca ccatcaagga ccctgccaac aggaggtatg aggtgcccct ggaaactccc |
| 1801 | agggtgcact ctagggcccc cagccccctg tattctgtgg agttctctga ggagcctttt |
| 1861 | ggggtcattg tccacaggca gctggatggc agggtgctgc tgaatactac tgtggcccct |
| 1921 | ctgttctttg ctgaccagtt cctgcagctg agcaccagcc tgccttctca gtacattact |
| 1981 | ggcctggctg agcatctgag ccccctgatg ctgagcacct cttggaccag aatcaccctg |
| 2041 | tggaacaggg acctggctcc cactcctggg gccaacctgt atggcagcca ccccttctac |
| 2101 | ctggccctgg aggatggggg ctctgcccat ggggtgttcc tgctgaacag caatgccatg |
| 2161 | gatgtggtgc tgcagccctc tcctgccctg tcttggagat ctactggggg catcctggat |
| 2221 | gtgtatatct tcctggggcc tgagcccaag tctgtggtgc agcagtacct ggatgtggtg |
| 2281 | ggctacccct tcatgccccc ctactggggc ctgggcttcc acctgtgcag gtggggctac |
| 2341 | tcttctactg ctatcaccag gcaggtggtg gagaacatga ccagggctca cttccctctg |
| 2401 | gatgtgcagt ggaatgacct ggactacatg gactctagga gagacttcac ttttaataag |
| 2461 | gatgggttca gggactttcc tgccatggtg caggagctgc atcagggggg caggagatat |
| 2521 | atgatgattg tggaccctgc tatttctagc tctggccctg ctggcagcta taggccctat |
| 2581 | gatgaggggc tgaggagggg ggtgttcatc actaatgaga ctggccagcc cctgattggc |
| 2641 | aaggtgtggc ctggctctac tgccttccct gatttcacca accccactgc cctggcctgg |
| 2701 | tgggaggata tggtggctga gtttcatgac caggtgccct ttgatggcat gtggattgac |
| 2761 | atgaatgagc ccagcaactt tatcaggggc tctgaagatg gctgccccaa caatgagctg |
| 2821 | gagaaccccc cctatgtgcc tggggtggtg gggggcaccc tgcaggctgc caccatctgt |
| 2881 | gccagcagcc accagttcct gagcacccac tataacctgc acaacctgta tggcctgact |
| 2941 | gaggccattg cctctcacag ggccctggtg aaggctaggg ggactaggcc ctttgtgatc |
| 3001 | agcaggtcta cttttgctgg ccatggcagg tatgctgggc actggactgg ggatgtgtgg |
| 3061 | tctagctggg agcagctggc cagctctgtg cctgagatcc tgcagtttaa tctgctgggg |
| 3121 | gtgcccctgg tgggggctga tgtgtgtggc ttcctgggca atacctctga ggagctgtgt |
| 3181 | gtgaggtgga ctcagctggg ggctttctac cccttcatga gaaaccacaa ctctctgctg |
| 3241 | agcctgcccc aggagcccta ttctttttct gagcctgccc agcaggctat gaggaaggcc |
| 3301 | ctgactctga ggtatgccct gctgccccac ctgtataccc tgttccatca ggcccatgtg |
| 3361 | gctggggaga ctgtggccag acctctgttc ctggagttcc ccaaggatag ctctacttgg |
| 3421 | actgtggacc accagctgct gtggggggag gctctgctga tcacccctgt gctgcaggct |
| 3481 | gggaaggctg aggtgactgg ctatttcccc ctgggcacct ggtatgatct gcagactgtg |
| 3541 | cccattgagg ccctgggctc tctgccccct ccccctgctg cccccaggga gcctgccatc |
| 3601 | cactctgagg gccagtgggt gaccctgcct gcccctctgg acactatcaa tgtgcacctg |
| 3661 | agggctggct acatcatccc cctgcagggc cctggcctga ctaccactga gtctaggcag |
| 3721 | cagcccatgg ccctggctgt ggctctgacc aagggggggg aggccagggg ggagctgttc |
| 3781 | tgggatgatg gggagtctct ggaggtgctg gagagggggg cctacaccca ggtgatcttc |
| 3841 | ctggctagga ataacaccat tgtcaatgag ctggtgaggg tgacctctga gggggctggc |
| 3901 | ctgcagctgc agaaggtgac tgtgctgggg gtggctactg ccccccagca ggtgctgagc |
| 3961 | aatggggtgc ctgtgagcaa cttcacctat agccctgaca ccaaggtgct ggacatctgt |
| 4021 | gtgagcctgc tgatggggga gcagttcctg gtgagctggt gctaatttaa atctcgagcc |
| 4081 | gggcggagtg tgttagtctc tccagaggga ggctggttcc ccagggaagc agagcctgtg |
| 4141 | tgcgggcagc agctgtgtgc gggcctgggg gttgttaagt gcaattattt ttaataaaag |
| 4201 | gggcatttgg aaaaaaaaaa aaaaggtagc agtcgacaga tgaattctgc agatctgtgg |
| 4261 | cttctagctg cccgggtggc atccctgtga cccctcccca gtgcctctcc tggccctgga |
| 4321 | agttgccact ccagtgccca ccagccttgt cctaataaaa ttaagttgca tcattttgtc |
| 4381 | tgactaggtg tccttctata atattatggg gtggaggggg gtggtatgga gcaaggggca |
| 4441 | agttgggaag acaacctgta gggcctgcgg ggtctattgg gaaccaagct ggagtgcagt |
| 4501 | ggcacaatct tggctcactg caatctccgc ctcctgggtt caagcgattc tcctgcctca |
| 4561 | gcctcccgag ttgttgggat tccaggcatg catgaccagg ctcagctaat ttttgttttt |
| 4621 | ttggtagaga cggggtttca ccatattggc caggctggtc tccaactcct aatctcaggt |
| 4681 | gatctaccca ccttggcctc ccaaattgct gggattacag gcgtgaacca ctgctccctt |
| 4741 | ccctgtcctt ctgattttaa aaaaaagaga aatgttctgg cacctgcact tgcactgggg |
| 4801 | acagcctatt ttgctagttt gttttgtttc gttttgtttt gatggagagc gtatgttgtt |
| 4861 | taaacgcggc cgcgtagata agtagcatgg cgggttaatc attaactaca aggaacccct |
| 4921 | agtgatggag ttggccactc cctctctgcg cgctcgctcg ctcactgagg ccgggcgacc |
| 4981 | aaaggtcgcc cgacgcccgg gctttgcccg ggcggcctca gtgagcgagc gagcgcgcag |
| 5041 | ttaattaagg cgccctaggc cgacccttag actctgtact cagttctata aacgagccat |
| 5101 | tggatacgag atccgtagat tgataaggga cacggaatat ccccggacgc aatagacacc |
| 5161 | ggtggacagc ttggtatcct gagcacagtc gcgcgtccga atctagctct actttagagg |
| 5221 | ccccggattc tgatggtcgt agaccgcaga accgattggg gggatgagat ctactagtta |
| 5281 | tcagcacaca attgcccatt atacgcgcgt ataatggact attgtgtgct gatataggga |
| 5341 | taacagggta attctagagc tagcatatgg atccatcgat ttgatgcggt attttctcct |
| 5401 | tacgcatctg tgcggtattt cacaccgcat acgtcaaagc aaccatagta cgcgccctgt |
| 5461 | agcggcgcat taagcgcggc gggtgtggtg gttacgcgca gcgtgaccgc tacacttgcc |
| 5521 | agcgccctag cgcccgctcc tttcgctttc ttcccttcct ttctcgccac gttcgccggc |
| 5581 | tttccccgtc aagctctaaa tcgggggctc cctttagggt tccgatttag tgctttacgg |
| 5641 | cacctcgacc ccaaaaaact tgatttgggt gatggttcac gtagtgggcc atcgccctga |
| 5701 | tagacggttt ttcgcccttt gacgttggag tccacgttct ttaatagtgg actcttgttc |
| 5761 | caaactggaa caacactcaa ctctatctcg ggctattctt ttgatttata agggattttg |
| 5821 | ccgatttcgg tctattggtt aaaaaatgag ctgatttaac aaaaatttaa cgcgaatttt |
| 5881 | aacaaaatat taacgtttac aattttatgg tgcactctca gtacaatctg ctctgatgcc |
| 5941 | gcatagttaa gccagccccg acacccgcca acacccgctg acgcgccctg acgggcttgt |
| 6001 | ctgctcccgg catccgctta cagacaagct gtgaccgtct ccgggagctg catgtgtcag |
| 6061 | aggttttcac cgtcatcacc gaaacgcgcg agacgaaagg gcctcgtgat acgcctattt |
| 6121 | ttataggtta atgtcatgat aataatggtt tcttagacgt caggtggcac ttttcgggga |
| 6181 | aatgtgcgcg gaacccctat ttgtttattt ttctaaatac attcaaatat gtatccgctc |
| 6241 | atgagacaat aaccctgata aatgcttcaa taatattgaa aaaggaagag tatgagccat |
| 6301 | attcaacggg aaacgtcgag gccgcgatta aattccaaca tggatgctga tttatatggg |
| 6361 | tataaatggg ctcgcgataa tgtcgggcaa tcaggtgcga caatctatcg cttgtatggg |
| 6421 | aagcccgatg cgccagagtt gtttctgaaa catggcaaag gtagcgttgc caatgatgtt |
| 6481 | acagatgaga tggtcagact aaactggctg acggaattta tgcctcttcc gaccatcaag |
| 6541 | cattttatcc gtactcctga tgatgcatgg ttactcacca ctgcgatccc cggaaaaaca |
| 6601 | gcattccagg tattagaaga atatcctgat tcaggtgaaa atattgttga tgcgctggca |
| 6661 | gtgttcctgc gccggttgca ttcgattcct gtttgtaatt gtccttttaa cagcgatcgc |
| 6721 | gtatttcgtc tcgctcaggc gcaatcacga atgaataacg gtttggttga tgcgagtgat |
| 6781 | tttgatgacg agcgtaatgg ctggcctgtt gaacaagtct ggaaagaaat gcataaactt |
| 6841 | ttgccattct caccggattc agtcgtcact catggtgatt tctcacttga taaccttatt |
| 6901 | tttgacgagg ggaaattaat aggttgtatt gatgttggac gagtcggaat cgcagaccga |
| 6961 | taccaggatc ttgccatcct atggaactgc ctcggtgagt tttctccttc attacagaaa |
| 7021 | cggctttttc aaaaatatgg tattgataat cctgatatga ataaattgca gtttcatttg |
| 7081 | atgctcgatg agtttttcta agcgtataat ggtctagagc tagcatatgg atccatcgat |
| 7141 | tccattatac gcctgtcaga ccaagtttac tcatatatac tttagattga tttaaaactt |
| 7201 | catttttaat ttaaaaggat ctaggtgaag atcctttttg ataatctcat gaccaaaatc |
| 7261 | ccttaacgtg agttttcgtt ccactgagcg tcagaccccg tagaaaagat caaaggatct |
| 7321 | tcttgagatc ctttttttct gcgcgtaatc tgctgcttgc aaacaaaaaa accaccgcta |
| 7381 | ccagcggtgg tttgtttgcc ggatcaagag ctaccaactc tttttccgaa ggtaactggc |
| 7441 | ttcagcagag cgcagatacc aaatactgtt cttctagtgt agccgtagtt aggccaccac |
| 7501 | ttcaagaact ctgtagcacc gcctacatac ctcgctctgc taatcctgtt accagtggct |
| 7561 | gctgccagtg gcgataagtc gtgtcttacc gggttggact caagacgata gttaccggat |
| 7621 | aaggcgcagc ggtcgggctg aacggggggt tcgtgcacac agcccagctt ggagcgaacg |
| 7681 | acctacaccg aactgagata cctacagcgt gagctatgag aaagcgccac gcttcccgaa |
| 7741 | gggagaaagg cggacaggta tccggtaagc ggcagggtcg gaacaggaga gcgcacgagg |
| 7801 | gagcttccag ggggaaacgc ctggtatctt tatagtcctg tcgggtttcg ccacctctga |
| 7861 | cttgagcgtc gatttttgtg atgctcgtca ggggggcgga gcctatggaa aaacgccagc |
| 7921 | aacgcggcct ttttacggtt cctggccttt tgctggcctt ttgctcacat gt |

| pP080_seq100-201Ig_3-56 deletion (SEQ ID NO: 485) | |
|---|---|
| (SEQ ID NO: 485) | |
| 1 | tctagagcta gcatatggat ccatcgattt agggataaca gggtaattat cagcacacaa |
| 61 | ttgcccatta tacgcgcgta taatggacta ttgtgtgctg atatctgtac acttaagggc |
| 121 | tagatcttag cttacgtcac tagagggtcc acgtttagtt tttaagatcc attgatctcc |
| 181 | taaacgctgc aagattcgca acctggtata cttagcctag gcgctaggtc ctagtgcagc |
| 241 | gggacttttt ttctaaagtc gttgagagga ggagtcgtca gaccagatag ctttgatgtc |
| 301 | ctgatcggaa ggatcgttgg cccccctgca ggcagctgtt aattaactgc gcgctcgctc |
| 361 | gctcactgag gccgcccggg caaagcccgg gcgtcgggcg acctttggtc gcccggcctc |
| 421 | agtgagcgag cgagcgcgca gagagggagt ggccaactcc atcactaggg gttccttgta |
| 481 | gttaatgatt aacccgccat gctacttatc tacggcgcgc cacgcgttct aggagttaat |
| 541 | ttttaaaaag cagtcaaaag tccaagtgcc cttgcgagca tttactctct ctgtttgctc |
| 601 | tggttaataa tctcaggagc acaaacattc cttactagtt ctaggagtta atttttaaaa |
| 661 | agcagtcaaa agtccaagtg cccttgcgag catttactct ctctgtttgc tctggttaat |
| 721 | aatctcagga gcacaaacat tccttactag ttctagagcg gccgccagtg tgctggaatt |
| 781 | cggctttttt agggctggaa gctacctttg acatcatttc ctctgcgaat gcatgtataa |
| 841 | tttctacaga acctattaga aaggatcacc cagcctctgc ttttgtacaa ctttccctta |
| 901 | aaaaactgcc aatcccactg ctgtttggcc caatagtgag aactttttcc tgctgcctct |
| 961 | tggtgctttt gcctatggcc cctattctgc ctgctgaaga cactcttgcc agcatggact |
| 1021 | taaacccctc cagctctgac aatcctcttt ctcttttgtt ttacatgaag ggtctggcag |
| 1081 | ccaaagcaat cactcaaagt tcaaacctta tcattttttg ctttgttcct cttggccttg |
| 1141 | gttttgtaca tcagctttga aaataccatc ccagggttaa tgctggggtt aatttataac |
| 1201 | tgagagtgct ctagttctgc aatacaggac atgctataaa aatggaaaga tgttgctttc |
| 1261 | tgagagatca ggtggattct tgggcatttg cttaagcttg gtaccgccac catgggggag |
| 1321 | tttgggctga gctgggtctt tctggtggcc ctgctgaagg gagtccagtg tgagcagcag |
| 1381 | ggggccagca ggccaggccc cagggatgcc caggcccacc ctggcagacc cagggctgtg |
| 1441 | cccacccagt gtgatgtgcc tcccaacagc agatttgact gtgcccctga taaggccatt |
| 1501 | actcaggaac agtgtgaggc caggggctgc tgctatatcc ctgccaagca gggcctgcag |
| 1561 | ggggcccaga tggggcagcc ctggtgcttc ttccccccca gctacccctc ttataagctg |
| 1621 | gagaatctga gcagctctga aatgggctac actgccactc tgaccaggac tacccccacc |
| 1681 | ttcttcccca aggatattct gactctgagg ctggatgtga tgatggagac tgagaacagg |
| 1741 | ctgcacttca ccatcaagga ccctgccaac aggaggtatg aggtgcccct ggaaactccc |
| 1801 | agggtgcact ctagggcccc cagccccctg tattctgtgg agttctctga ggagcctttt |
| 1861 | ggggtcattg tccacaggca gctggatggc agggtgctgc tgaatactac tgtggcccct |
| 1921 | ctgttctttg ctgaccagtt cctgcagctg agcaccagcc tgccttctca gtacattact |
| 1981 | ggcctggctg agcatctgag ccccctgatg ctgagcacct cttggaccag aatcaccctg |
| 2041 | tggaacaggg acctggctcc cactcctggg gccaacctgt atggcagcca ccccttctac |
| 2101 | ctggccctgg aggatggggg ctctgcccat ggggtgttcc tgctgaacag caatgccatg |
| 2161 | gatgtggtgc tgcagccctc tcctgccctg tcttggagat ctactggggg catcctggat |
| 2221 | gtgtatatct tcctggggcc tgagcccaag tctgtggtgc agcagtacct ggatgtggtg |
| 2281 | ggctacccct tcatgccccc ctactggggc ctgggcttcc acctgtgcag gtggggctac |
| 2341 | tcttctactg ctatcaccag gcaggtggtg gagaacatga ccagggctca cttccctctg |
| 2401 | gatgtgcagt ggaatgacct ggactacatg gactctagga gagacttcac ttttaataag |
| 2461 | gatgggttca gggactttcc tgccatggtg caggagctgc atcagggggg caggagatat |
| 2521 | atgatgattg tggaccctgc tatttctagc tctggccctg ctggcagcta taggccctat |
| 2581 | gatgaggggc tgaggagggg ggtgttcatc actaatgaga ctggccagcc cctgattggc |
| 2641 | aaggtgtggc ctggctctac tgccttccct gatttcacca accccactgc cctggcctgg |
| 2701 | tgggaggata tggtggctga gtttcatgac caggtgccct ttgatggcat gtggattgac |
| 2761 | atgaatgagc ccagcaactt tatcaggggc tctgaagatg gctgccccaa caatgagctg |
| 2821 | gagaaccccc cctatgtgcc tggggtggtg gggggcaccc tgcaggctgc caccatctgt |
| 2881 | gccagcagcc accagttcct gagcacccac tataacctgc acaacctgta tggcctgact |
| 2941 | gaggccattg cctctcacag ggccctggtg aaggctaggg ggactaggcc ctttgtgatc |
| 3001 | agcaggtcta cttttgctgg ccatggcagg tatgctgggc actggactgg ggatgtgtgg |
| 3061 | tctagctggg agcagctggc cagctctgtg cctgagatcc tgcagtttaa tctgctgggg |
| 3121 | gtgcccctgg tgggggctga tgtgtgtggc ttcctgggca atacctctga ggagctgtgt |
| 3181 | gtgaggtgga ctcagctggg ggctttctac cccttcatga gaaaccacaa ctctctgctg |
| 3241 | agcctgcccc aggagcccta ttctttttct gagcctgccc agcaggctat gaggaaggcc |
| 3301 | ctgactctga ggtatgccct gctgccccac ctgtataccc tgttccatca ggcccatgtg |
| 3361 | gctggggaga ctgtggccag acctctgttc ctggagttcc ccaaggatag ctctacttgg |
| 3421 | actgtggacc accagctgct gtggggggag gctctgctga tcacccctgt gctgcaggct |
| 3481 | gggaaggctg aggtgactgg ctatttcccc ctgggcacct ggtatgatct gcagactgtg |
| 3541 | cccattgagg ccctgggctc tctgccccct ccccctgctg cccccaggga gcctgccatc |
| 3601 | cactctgagg gccagtgggt gaccctgcct gcccctctgg acactatcaa tgtgcacctg |
| 3661 | agggctggct acatcatccc cctgcagggc cctggcctga ctaccactga gtctaggcag |
| 3721 | cagcccatgg ccctggctgt ggctctgacc aagggggggg aggccagggg ggagctgttc |
| 3781 | tgggatgatg gggagtctct ggaggtgctg gagagggggg cctacaccca ggtgatcttc |
| 3841 | ctggctagga ataacaccat tgtcaatgag ctggtgaggg tgacctctga gggggctggc |
| 3901 | ctgcagctgc agaaggtgac tgtgctgggg gtggctactg ccccccagca ggtgctgagc |
| 3961 | aatggggtgc ctgtgagcaa cttcacctat agccctgaca ccaaggtgct ggacatctgt |
| 4021 | gtgagcctgc tgatggggga gcagttcctg gtgagctggt gctaatttaa atctcgagcc |
| 4081 | gggcggagtg tgttagtctc tccagaggga ggctggttcc ccagggaagc agagcctgtg |
| 4141 | tgcgggcagc agctgtgtgc gggcctgggg gttgttaagt gcaattattt ttaataaaag |
| 4201 | gggcatttgg aaaaaaaaaa aaaaggtagc agtcgacaga tgaattctgc agatctgtgg |
| 4261 | cttctagctg cccgggtggc atccctgtga cccctcccca gtgcctctcc tggccctgga |
| 4321 | agttgccact ccagtgccca ccagccttgt cctaataaaa ttaagttgca tcattttgtc |
| 4381 | tgactaggtg tccttctata atattatggg gtggaggggg gtggtatgga gcaaggggca |
| 4441 | agttgggaag acaacctgta gggcctgcgg ggtctattgg gaaccaagct ggagtgcagt |
| 4501 | ggcacaatct tggctcactg caatctccgc ctcctgggtt caagcgattc tcctgcctca |
| 4561 | gcctcccgag ttgttgggat tccaggcatg catgaccagg ctcagctaat ttttgttttt |
| 4621 | ttggtagaga cggggtttca ccatattggc caggctggtc tccaactcct aatctcaggt |
| 4681 | gatctaccca ccttggcctc ccaaattgct gggattacag gcgtgaacca ctgctccctt |
| 4741 | ccctgtcctt ctgattttaa aaaaaagaga aatgttctgg cacctgcact tgcactgggg |
| 4801 | acagcctatt ttgctagttt gttttgtttc gttttgtttt gatggagagc gtatgttgtt |
| 4861 | taaacgcggc cgcgtagata agtagcatgg cgggttaatc attaactaca aggaacccct |
| 4921 | agtgatggag ttggccactc cctctctgcg cgctcgctcg ctcactgagg ccgggcgacc |
| 4981 | aaaggtcgcc cgacgcccgg gctttgcccg ggcggcctca gtgagcgagc gagcgcgcag |
| 5041 | ttaattaagg cgccctaggc cgacccttag actctgtact cagttctata aacgagccat |
| 5101 | tggatacgag atccgtagat tgataaggga cacggaatat ccccggacgc aatagacacc |
| 5161 | ggtggacagc ttggtatcct gagcacagtc gcgcgtccga atctagctct actttagagg |
| 5221 | ccccggattc tgatggtcgt agaccgcaga accgattggg gggatgagat ctactagtta |
| 5281 | tcagcacaca attgcccatt atacgcgcgt ataatggact attgtgtgct gatataggga |
| 5341 | taacagggta attctagagc tagcatatgg atccatcgat ttgatgcggt attttctcct |
| 5401 | tacgcatctg tgcggtattt cacaccgcat acgtcaaagc aaccatagta cgcgccctgt |
| 5461 | agcggcgcat taagcgcggc gggtgtggtg gttacgcgca gcgtgaccgc tacacttgcc |
| 5521 | agcgccctag cgcccgctcc tttcgctttc ttcccttcct ttctcgccac gttcgccggc |
| 5581 | tttccccgtc aagctctaaa tcgggggctc cctttagggt tccgatttag tgctttacgg |
| 5641 | cacctcgacc ccaaaaaact tgatttgggt gatggttcac gtagtgggcc atcgccctga |
| 5701 | tagacggttt ttcgcccttt gacgttggag tccacgttct ttaatagtgg actcttgttc |
| 5761 | caaactggaa caacactcaa ctctatctcg ggctattctt ttgatttata agggattttg |
| 5821 | ccgatttcgg tctattggtt aaaaaatgag ctgatttaac aaaaatttaa cgcgaatttt |
| 5881 | aacaaaatat taacgtttac aattttatgg tgcactctca gtacaatctg ctctgatgcc |
| 5941 | gcatagttaa gccagccccg acacccgcca acacccgctg acgcgccctg acgggcttgt |
| 6001 | ctgctcccgg catccgctta cagacaagct gtgaccgtct ccgggagctg catgtgtcag |
| 6061 | aggttttcac cgtcatcacc gaaacgcgcg agacgaaagg gcctcgtgat acgcctattt |
| 6121 | ttataggtta atgtcatgat aataatggtt tcttagacgt caggtggcac ttttcgggga |
| 6181 | aatgtgcgcg gaacccctat ttgtttattt ttctaaatac attcaaatat gtatccgctc |
| 6241 | atgagacaat aaccctgata aatgcttcaa taatattgaa aaaggaagag tatgagccat |
| 6301 | attcaacggg aaacgtcgag gccgcgatta aattccaaca tggatgctga tttatatggg |
| 6361 | tataaatggg ctcgcgataa tgtcgggcaa tcaggtgcga caatctatcg cttgtatggg |
| 6421 | aagcccgatg cgccagagtt gtttctgaaa catggcaaag gtagcgttgc caatgatgtt |
| 6481 | acagatgaga tggtcagact aaactggctg acggaattta tgcctcttcc gaccatcaag |
| 6541 | cattttatcc gtactcctga tgatgcatgg ttactcacca ctgcgatccc cggaaaaaca |
| 6601 | gcattccagg tattagaaga atatcctgat tcaggtgaaa atattgttga tgcgctggca |
| 6661 | gtgttcctgc gccggttgca ttcgattcct gtttgtaatt gtccttttaa cagcgatcgc |
| 6721 | gtatttcgtc tcgctcaggc gcaatcacga atgaataacg gtttggttga tgcgagtgat |
| 6781 | tttgatgacg agcgtaatgg ctggcctgtt gaacaagtct ggaaagaaat gcataaactt |
| 6841 | ttgccattct caccggattc agtcgtcact catggtgatt tctcacttga taaccttatt |
| 6901 | tttgacgagg ggaaattaat aggttgtatt gatgttggac gagtcggaat cgcagaccga |
| 6961 | taccaggatc ttgccatcct atggaactgc ctcggtgagt tttctccttc attacagaaa |
| 7021 | cggctttttc aaaaatatgg tattgataat cctgatatga ataaattgca gtttcatttg |
| 7081 | atgctcgatg agtttttcta agcgtataat ggtctagagc tagcatatgg atccatcgat |
| 7141 | tccattatac gcctgtcaga ccaagtttac tcatatatac tttagattga tttaaaactt |
| 7201 | catttttaat ttaaaaggat ctaggtgaag atcctttttg ataatctcat gaccaaaatc |
| 7261 | ccttaacgtg agttttcgtt ccactgagcg tcagaccccg tagaaaagat caaaggatct |
| 7321 | tcttgagatc ctttttttct gcgcgtaatc tgctgcttgc aaacaaaaaa accaccgcta |
| 7381 | ccagcggtgg tttgtttgcc ggatcaagag ctaccaactc tttttccgaa ggtaactggc |
| 7441 | ttcagcagag cgcagatacc aaatactgtt cttctagtgt agccgtagtt aggccaccac |
| 7501 | ttcaagaact ctgtagcacc gcctacatac ctcgctctgc taatcctgtt accagtggct |
| 7561 | gctgccagtg gcgataagtc gtgtcttacc gggttggact caagacgata gttaccggat |
| 7621 | aaggcgcagc ggtcgggctg aacggggggt tcgtgcacac agcccagctt ggagcgaacg |
| 7681 | acctacaccg aactgagata cctacagcgt gagctatgag aaagcgccac gcttcccgaa |
| 7741 | gggagaaagg cggacaggta tccggtaagc ggcagggtcg gaacaggaga gcgcacgagg |
| 7801 | gagcttccag ggggaaacgc ctggtatctt tatagtcctg tcgggtttcg ccacctctga |
| 7861 | cttgagcgtc gatttttgtg atgctcgtca ggggggcgga gcctatggaa aaacgccagc |
| 7921 | aacgcggcct ttttacggtt cctggccttt tgctggcctt ttgctcacat gt |

| pP081_seq3-IL2wt_3-56 deletion (SEQ ID NO: 486) | |
|---|---|
| (SEQ ID NO: 486) | |
| 1 | tctagagcta gcatatggat ccatcgattt agggataaca gggtaattat cagcacacaa |
| 61 | ttgcccatta tacgcgcgta taatggacta ttgtgtgctg atatctgtac acttaagggc |
| 121 | tagatcttag cttacgtcac tagagggtcc acgtttagtt tttaagatcc attgatctcc |
| 181 | taaacgctgc aagattcgca acctggtata cttagcctag gcgctaggtc ctagtgcagc |
| 241 | gggacttttt ttctaaagtc gttgagagga ggagtcgtca gaccagatag ctttgatgtc |
| 301 | ctgatcggaa ggatcgttgg cccccctgca ggcagctgtt aattaactgc gcgctcgctc |
| 361 | gctcactgag gccgcccggg caaagcccgg gcgtcgggcg acctttggtc gcccggcctc |
| 421 | agtgagcgag cgagcgcgca gagagggagt ggccaactcc atcactaggg gttccttgta |
| 481 | gttaatgatt aacccgccat gctacttatc tacggcgcgc cacgcgttct aggagttaat |
| 541 | ttttaaaaag cagtcaaaag tccaagtgcc cttgcgagca tttactctct ctgtttgctc |
| 601 | tggttaataa tctcaggagc acaaacattc cttactagtt ctaggagtta atttttaaaa |
| 661 | agcagtcaaa agtccaagtg cccttgcgag catttactct ctctgtttgc tctggttaat |
| 721 | aatctcagga gcacaaacat tccttactag ttctagagcg gccgccagtg tgctggaatt |
| 781 | cggctttttt agggctggaa gctacctttg acatcatttc ctctgcgaat gcatgtataa |
| 841 | tttctacaga acctattaga aaggatcacc cagcctctgc ttttgtacaa ctttccctta |
| 901 | aaaaactgcc aatcccactg ctgtttggcc caatagtgag aactttttcc tgctgcctct |
| 961 | tggtgctttt gcctatggcc cctattctgc ctgctgaaga cactcttgcc agcatggact |
| 1021 | taaacccctc cagctctgac aatcctcttt ctcttttgtt ttacatgaag ggtctggcag |
| 1081 | ccaaagcaat cactcaaagt tcaaacctta tcattttttg ctttgttcct cttggccttg |
| 1141 | gttttgtaca tcagctttga aaataccatc ccagggttaa tgctggggtt aatttataac |
| 1201 | tgagagtgct ctagttctgc aatacaggac atgctataaa aatggaaaga tgttgctttc |
| 1261 | tgagagatca ggtggattct tgggcatttg cttaagcttg gtaccgccac catggggtac |
| 1321 | agaatgcagc tgctgtcctg cattgcactg tcactggcac tggttaccaa ctcacagcag |
| 1381 | ggagcttcta gacctggacc tagagatgct caggctcatc ctggaagacc tagagctgtg |
| 1441 | cctacacagt gtgatgtgcc tcctaattct agatttgatt gtgctcctga taaggctata |
| 1501 | acacaggagc agtgtgaggc tagaggatgt tgttatattc ctgctaagca gggactgcag |
| 1561 | ggagctcaga tgggacagcc ttggtgtttt tttcctcctt cttatccttc ttataagctg |
| 1621 | gagaatctgt cttcttctga gatgggatat acagctacac tgacaagaac aacacctaca |
| 1681 | ttttttccta aggatattct gacactgaga ctggatgtga tgatggagac agagaataga |
| 1741 | ctgcatttta caattaagga tcctgctaat agaagatatg aggtgcctct agagacacct |
| 1801 | agagtgcatt ctagagctcc ttctcctctg tattctgtgg agttttctga ggagcctttt |
| 1861 | ggagtgattg tgcatagaca gctggatgga agagtgctgc tgaatacaac agtggctcct |
| 1921 | ctgttttttg ctgatcagtt tctgcagctg tctacatctc tgccttctca gtatattaca |
| 1981 | ggactggctg agcatctgtc tcctctgatg ctgtctacat cttggacaag aattacactg |
| 2041 | tggaatagag atctggctcc tacacctgga gctaatctgt atggatctca tcctttttat |
| 2101 | ctggctctgg aggatggagg atctgctcat ggagtgtttc tgctgaattc taatgctatg |
| 2161 | gatgtagtgc tgcagccttc tcctgctctg tcttggagat ctacaggagg aattctggat |
| 2221 | gtgtatattt ttctaggacc tgagcctaag tctgtggtgc agcagtatct ggatgtagtg |
| 2281 | ggatatcctt ttatgcctcc ttattgggga ctgggatttc atctgtgtag atggggatat |
| 2341 | tcttctacag ctattacaag acaggtggtt gagaatatga caagagctca ttttcctctg |
| 2401 | gatgtgcagt ggaatgatct agattatatg gattctagaa gagattttac atttaataag |
| 2461 | gatggattta gagattttcc tgctatggtg caggagctgc atcagggagg aagaagatat |
| 2521 | atgatgattg tggatcctgc tatttcttct tctggacctg ctggatctta tagaccttat |
| 2581 | gatgagggac tgagaagagg agtgtttatt acaaatgaga caggacagcc tctgattgga |
| 2641 | aaggtgtggc ctggatctac agcttttcct gattttacaa atcctacagc tctggcttgg |
| 2701 | tgggaggata tggtggctga gtttcatgat caggtgcctt ttgatggaat gtggattgat |
| 2761 | atgaatgagc cttctaattt tataagagga tctgaggatg gatgtcctaa taatgagcta |
| 2821 | gagaatcctc cttatgtgcc tggagtagtg ggaggaacac tgcaggctgc tacaatttgt |
| 2881 | gcttcttctc atcagtttct gtctacacat tataatctgc ataatctgta tggactgaca |
| 2941 | gaggctattg cttctcatag agctctggtg aaggctagag gaacaagacc ttttgtgatt |
| 3001 | tctagatcta catttgctgg acatggaaga tatgctggac attggacagg agatgtatgg |
| 3061 | tcttcttggg agcagctagc ttcttctgtg cctgagattc tgcagtttaa tctgctagga |
| 3121 | gtgcctctgg tgggagctga tgtgtgtgga tttctgggaa atacatctga ggagctgtgt |
| 3181 | gtgagatgga cacagctggg agctttttat ccttttatga gaaatcataa ttctctgctg |
| 3241 | tctctgcctc aggagcctta ttctttttct gagcctgctc agcaggctat gagaaaggct |
| 3301 | ctgacactga gatatgctct gctgcctcat ctgtatacac tgtttcatca ggctcatgtg |
| 3361 | gctggagaga cagtagctag acctctgttt ctggagtttc ctaaggattc ttctacatgg |
| 3421 | acagttgatc atcagctgct gtggggagag gctctgctga ttacacctgt gctgcaggct |
| 3481 | ggaaaggctg aggtgacagg atattttcct ctgggaacat ggtatgatct gcagacagtg |
| 3541 | cctatagagg ctctgggatc tctgcctcct cctcctgctg ctcctagaga gcctgctatt |
| 3601 | cattctgagg gacagtgggt gacactgcct gctcctctgg atacaattaa tgtgcatctg |
| 3661 | agagctggat atattattcc tctgcaggga cctggactga caacaacaga gtctagacag |
| 3721 | cagcctatgg ctctggctgt ggctctgaca aagggaggag aggctagagg agagctgttt |
| 3781 | tgggatgatg gagagtctct ggaggtgctg gagagaggag cttatacaca ggtgattttt |
| 3841 | ctggctagaa ataatacaat tgtgaatgag ctggtgagag tgacatctga gggagctgga |
| 3901 | ctgcagctgc agaaggtgac agtgctggga gtggctacag ctcctcagca ggtgctgtct |
| 3961 | aatggagtgc ctgtgtctaa ttttacatat tctcctgata caaaggtgct ggatatttgt |
| 4021 | gtgtctctgc tgatgggaga gcagtttctg gtgtcttggt gttaatgatt taaatctcga |
| 4081 | gccgggcgga gtgtgttagt ctctccagag ggaggctggt tccccaggga agcagagcct |
| 4141 | gtgtgcgggc agcagctgtg tgcgggcctg ggggttgtta agtgcaatta tttttaataa |
| 4201 | aaggggcatt tggaaaaaaa aaaaaaaggt agcagtcgac agatgaattc tgcagatctg |
| 4261 | tggcttctag ctgcccgggt ggcatccctg tgacccctcc ccagtgcctc tcctggccct |
| 4321 | ggaagttgcc actccagtgc ccaccagcct tgtcctaata aaattaagtt gcatcatttt |
| 4381 | gtctgactag gtgtccttct ataatattat ggggtggagg ggggtggtat ggagcaaggg |
| 4441 | gcaagttggg aagacaacct gtagggcctg cggggtctat tgggaaccaa gctggagtgc |
| 4501 | agtggcacaa tcttggctca ctgcaatctc cgcctcctgg gttcaagcga ttctcctgcc |
| 4561 | tcagcctccc gagttgttgg gattccaggc atgcatgacc aggctcagct aatttttgtt |
| 4621 | tttttggtag agacggggtt tcaccatatt ggccaggctg gtctccaact cctaatctca |
| 4681 | ggtgatctac ccaccttggc ctcccaaatt gctgggatta caggcgtgaa ccactgctcc |
| 4741 | cttccctgtc cttctgattt taaaaaaaag agaaatgttc tggcacctgc acttgcactg |
| 4801 | gggacagcct attttgctag tttgttttgt ttcgttttgt tttgatggag agcgtatgtt |
| 4861 | gtttaaacgc ggccgcgtag ataagtagca tggcgggtta atcattaact acaaggaacc |
| 4921 | cctagtgatg gagttggcca ctccctctct gcgcgctcgc tcgctcactg aggccgggcg |
| 4981 | accaaaggtc gcccgacgcc cgggctttgc ccgggcggcc tcagtgagcg agcgagcgcg |
| 5041 | cagttaatta aggcgcccta ggccgaccct tagactctgt actcagttct ataaacgagc |
| 5101 | cattggatac gagatccgta gattgataag ggacacggaa tatccccgga cgcaatagac |
| 5161 | accggtggac agcttggtat cctgagcaca gtcgcgcgtc cgaatctagc tctactttag |
| 5221 | aggccccgga ttctgatggt cgtagaccgc agaaccgatt ggggggatga gatctactag |
| 5281 | ttatcagcac acaattgccc attatacgcg cgtataatgg actattgtgt gctgatatag |
| 5341 | ggataacagg gtaattctag agctagcata tggatccatc gatttgatgc ggtattttct |
| 5401 | ccttacgcat ctgtgcggta tttcacaccg catacgtcaa agcaaccata gtacgcgccc |
| 5461 | tgtagcggcg cattaagcgc ggcgggtgtg gtggttacgc gcagcgtgac cgctacactt |
| 5521 | gccagcgccc tagcgcccgc tcctttcgct ttcttccctt cctttctcgc cacgttcgcc |
| 5581 | ggctttcccc gtcaagctct aaatcggggg ctccctttag ggttccgatt tagtgcttta |
| 5641 | cggcacctcg accccaaaaa acttgatttg ggtgatggtt cacgtagtgg gccatcgccc |
| 5701 | tgatagacgg tttttcgccc tttgacgttg gagtccacgt tctttaatag tggactcttg |
| 5761 | ttccaaactg gaacaacact caactctatc tcgggctatt cttttgattt ataagggatt |
| 5821 | ttgccgattt cggtctattg gttaaaaaat gagctgattt aacaaaaatt taacgcgaat |
| 5881 | tttaacaaaa tattaacgtt tacaatttta tggtgcactc tcagtacaat ctgctctgat |
| 5941 | gccgcatagt taagccagcc ccgacacccg ccaacacccg ctgacgcgcc ctgacgggct |
| 6001 | tgtctgctcc cggcatccgc ttacagacaa gctgtgaccg tctccgggag ctgcatgtgt |
| 6061 | cagaggtttt caccgtcatc accgaaacgc gcgagacgaa agggcctcgt gatacgccta |
| 6121 | tttttatagg ttaatgtcat gataataatg gtttcttaga cgtcaggtgg cacttttcgg |
| 6181 | ggaaatgtgc gcggaacccc tatttgttta tttttctaaa tacattcaaa tatgtatccg |
| 6241 | ctcatgagac aataaccctg ataaatgctt caataatatt gaaaaaggaa gagtatgagc |
| 6301 | catattcaac gggaaacgtc gaggccgcga ttaaattcca acatggatgc tgatttatat |
| 6361 | gggtataaat gggctcgcga taatgtcggg caatcaggtg cgacaatcta tcgcttgtat |
| 6421 | gggaagcccg atgcgccaga gttgtttctg aaacatggca aaggtagcgt tgccaatgat |
| 6481 | gttacagatg agatggtcag actaaactgg ctgacggaat ttatgcctct tccgaccatc |
| 6541 | aagcatttta tccgtactcc tgatgatgca tggttactca ccactgcgat ccccggaaaa |
| 6601 | acagcattcc aggtattaga agaatatcct gattcaggtg aaaatattgt tgatgcgctg |
| 6661 | gcagtgttcc tgcgccggtt gcattcgatt cctgtttgta attgtccttt taacagcgat |
| 6721 | cgcgtatttc gtctcgctca ggcgcaatca cgaatgaata acggtttggt tgatgcgagt |
| 6781 | gattttgatg acgagcgtaa tggctggcct gttgaacaag tctggaaaga aatgcataaa |
| 6841 | cttttgccat tctcaccgga ttcagtcgtc actcatggtg atttctcact tgataacctt |
| 6901 | atttttgacg aggggaaatt aataggttgt attgatgttg gacgagtcgg aatcgcagac |
| 6961 | cgataccagg atcttgccat cctatggaac tgcctcggtg agttttctcc ttcattacag |
| 7021 | aaacggcttt ttcaaaaata tggtattgat aatcctgata tgaataaatt gcagtttcat |
| 7081 | ttgatgctcg atgagttttt ctaagcgtat aatggtctag agctagcata tggatccatc |
| 7141 | gattccatta tacgcctgtc agaccaagtt tactcatata tactttagat tgatttaaaa |
| 7201 | cttcattttt aatttaaaag gatctaggtg aagatccttt ttgataatct catgaccaaa |
| 7261 | atcccttaac gtgagttttc gttccactga gcgtcagacc ccgtagaaaa gatcaaagga |
| 7321 | tcttcttgag atcctttttt tctgcgcgta atctgctgct tgcaaacaaa aaaaccaccg |
| 7381 | ctaccagcgg tggtttgttt gccggatcaa gagctaccaa ctctttttcc gaaggtaact |
| 7441 | ggcttcagca gagcgcagat accaaatact gttcttctag tgtagccgta gttaggccac |
| 7501 | cacttcaaga actctgtagc accgcctaca tacctcgctc tgctaatcct gttaccagtg |
| 7561 | gctgctgcca gtggcgataa gtcgtgtctt accgggttgg actcaagacg atagttaccg |
| 7621 | gataaggcgc agcggtcggg ctgaacgggg ggttcgtgca cacagcccag cttggagcga |
| 7681 | acgacctaca ccgaactgag atacctacag cgtgagctat gagaaagcgc cacgcttccc |
| 7741 | gaagggagaa aggcggacag gtatccggta agcggcaggg tcggaacagg agagcgcacg |
| 7801 | agggagcttc cagggggaaa cgcctggtat ctttatagtc ctgtcgggtt tcgccacctc |
| 7861 | tgacttgagc gtcgattttt gtgatgctcg tcaggggggc ggagcctatg gaaaaacgcc |
| 7921 | agcaacgcgg cctttttacg gttcctggcc ttttgctggc cttttgctca catgt |

| pP082_seq3-201Ig_3-56 deletion (SEQ ID NO: 487) | |
|---|---|
| (SEQ ID NO: 487) | |
| 1 | tctagagcta gcatatggat ccatcgattt agggataaca gggtaattat cagcacacaa |
| 61 | ttgcccatta tacgcgcgta taatggacta ttgtgtgctg atatctgtac acttaagggc |
| 121 | tagatcttag cttacgtcac tagagggtcc acgtttagtt tttaagatcc attgatctcc |
| 181 | taaacgctgc aagattcgca acctggtata cttagcctag gcgctaggtc ctagtgcagc |
| 241 | gggacttttt ttctaaagtc gttgagagga ggagtcgtca gaccagatag ctttgatgtc |
| 301 | ctgatcggaa ggatcgttgg cccccctgca ggcagctgtt aattaactgc gcgctcgctc |
| 361 | gctcactgag gccgcccggg caaagcccgg gcgtcgggcg acctttggtc gcccggcctc |
| 421 | agtgagcgag cgagcgcgca gagagggagt ggccaactcc atcactaggg gttccttgta |
| 481 | gttaatgatt aacccgccat gctacttatc tacggcgcgc cacgcgttct aggagttaat |
| 541 | ttttaaaaag cagtcaaaag tccaagtgcc cttgcgagca tttactctct ctgtttgctc |
| 601 | tggttaataa tctcaggagc acaaacattc cttactagtt ctaggagtta atttttaaaa |
| 661 | agcagtcaaa agtccaagtg cccttgcgag catttactct ctctgtttgc tctggttaat |
| 721 | aatctcagga gcacaaacat tccttactag ttctagagcg gccgccagtg tgctggaatt |
| 781 | cggctttttt agggctggaa gctacctttg acatcatttc ctctgcgaat gcatgtataa |
| 841 | tttctacaga acctattaga aaggatcacc cagcctctgc ttttgtacaa ctttccctta |
| 901 | aaaaactgcc aatcccactg ctgtttggcc caatagtgag aactttttcc tgctgcctct |
| 961 | tggtgctttt gcctatggcc cctattctgc ctgctgaaga cactcttgcc agcatggact |
| 1021 | taaacccctc cagctctgac aatcctcttt ctcttttgtt ttacatgaag ggtctggcag |
| 1081 | ccaaagcaat cactcaaagt tcaaacctta tcattttttg ctttgttcct cttggccttg |
| 1141 | gttttgtaca tcagctttga aaataccatc ccagggttaa tgctggggtt aatttataac |
| 1201 | tgagagtgct ctagttctgc aatacaggac atgctataaa aatggaaaga tgttgctttc |
| 1261 | tgagagatca ggtggattct tgggcatttg cttaagcttg gtaccgccac catgggggag |
| 1321 | tttgggctga gctgggtctt tctggtggcc ctgctgaagg gagtccagtg tgagcagcag |
| 1381 | ggagcttcta gacctggacc tagagatgct caggctcatc ctggaagacc tagagctgtg |
| 1441 | cctacacagt gtgatgtgcc tcctaattct agatttgatt gtgctcctga taaggctata |
| 1501 | acacaggagc agtgtgaggc tagaggatgt tgttatattc ctgctaagca gggactgcag |
| 1561 | ggagctcaga tgggacagcc ttggtgtttt tttcctcctt cttatccttc ttataagctg |
| 1621 | gagaatctgt cttcttctga gatgggatat acagctacac tgacaagaac aacacctaca |
| 1681 | ttttttccta aggatattct gacactgaga ctggatgtga tgatggagac agagaataga |
| 1741 | ctgcatttta caattaagga tcctgctaat agaagatatg aggtgcctct agagacacct |
| 1801 | agagtgcatt ctagagctcc ttctcctctg tattctgtgg agttttctga ggagcctttt |
| 1861 | ggagtgattg tgcatagaca gctggatgga agagtgctgc tgaatacaac agtggctcct |
| 1921 | ctgttttttg ctgatcagtt tctgcagctg tctacatctc tgccttctca gtatattaca |
| 1981 | ggactggctg agcatctgtc tcctctgatg ctgtctacat cttggacaag aattacactg |
| 2041 | tggaatagag atctggctcc tacacctgga gctaatctgt atggatctca tcctttttat |
| 2101 | ctggctctgg aggatggagg atctgctcat ggagtgtttc tgctgaattc taatgctatg |
| 2161 | gatgtagtgc tgcagccttc tcctgctctg tcttggagat ctacaggagg aattctggat |
| 2221 | gtgtatattt ttctaggacc tgagcctaag tctgtggtgc agcagtatct ggatgtagtg |
| 2281 | ggatatcctt ttatgcctcc ttattgggga ctgggatttc atctgtgtag atggggatat |
| 2341 | tcttctacag ctattacaag acaggtggtt gagaatatga caagagctca ttttcctctg |
| 2401 | gatgtgcagt ggaatgatct agattatatg gattctagaa gagattttac atttaataag |
| 2461 | gatggattta gagattttcc tgctatggtg caggagctgc atcagggagg aagaagatat |
| 2521 | atgatgattg tggatcctgc tatttcttct tctggacctg ctggatctta tagaccttat |
| 2581 | gatgagggac tgagaagagg agtgtttatt acaaatgaga caggacagcc tctgattgga |
| 2641 | aaggtgtggc ctggatctac agcttttcct gattttacaa atcctacagc tctggcttgg |
| 2701 | tgggaggata tggtggctga gtttcatgat caggtgcctt ttgatggaat gtggattgat |
| 2761 | atgaatgagc cttctaattt tataagagga tctgaggatg gatgtcctaa taatgagcta |
| 2821 | gagaatcctc cttatgtgcc tggagtagtg ggaggaacac tgcaggctgc tacaatttgt |
| 2881 | gcttcttctc atcagtttct gtctacacat tataatctgc ataatctgta tggactgaca |
| 2941 | gaggctattg cttctcatag agctctggtg aaggctagag gaacaagacc ttttgtgatt |
| 3001 | tctagatcta catttgctgg acatggaaga tatgctggac attggacagg agatgtatgg |
| 3061 | tcttcttggg agcagctagc ttcttctgtg cctgagattc tgcagtttaa tctgctagga |
| 3121 | gtgcctctgg tgggagctga tgtgtgtgga tttctgggaa atacatctga ggagctgtgt |
| 3181 | gtgagatgga cacagctggg agctttttat ccttttatga gaaatcataa ttctctgctg |
| 3241 | tctctgcctc aggagcctta ttctttttct gagcctgctc agcaggctat gagaaaggct |
| 3301 | ctgacactga gatatgctct gctgcctcat ctgtatacac tgtttcatca ggctcatgtg |
| 3361 | gctggagaga cagtagctag acctctgttt ctggagtttc ctaaggattc ttctacatgg |
| 3421 | acagttgatc atcagctgct gtggggagag gctctgctga ttacacctgt gctgcaggct |
| 3481 | ggaaaggctg aggtgacagg atattttcct ctgggaacat ggtatgatct gcagacagtg |
| 3541 | cctatagagg ctctgggatc tctgcctcct cctcctgctg ctcctagaga gcctgctatt |
| 3601 | cattctgagg gacagtgggt gacactgcct gctcctctgg atacaattaa tgtgcatctg |
| 3661 | agagctggat atattattcc tctgcaggga cctggactga caacaacaga gtctagacag |
| 3721 | cagcctatgg ctctggctgt ggctctgaca aagggaggag aggctagagg agagctgttt |
| 3781 | tgggatgatg gagagtctct ggaggtgctg gagagaggag cttatacaca ggtgattttt |
| 3841 | ctggctagaa ataatacaat tgtgaatgag ctggtgagag tgacatctga gggagctgga |
| 3901 | ctgcagctgc agaaggtgac agtgctggga gtggctacag ctcctcagca ggtgctgtct |
| 3961 | aatggagtgc ctgtgtctaa ttttacatat tctcctgata caaaggtgct ggatatttgt |
| 4021 | gtgtctctgc tgatgggaga gcagtttctg gtgtcttggt gttaatgatt taaatctcga |
| 4081 | gccgggcgga gtgtgttagt ctctccagag ggaggctggt tccccaggga agcagagcct |
| 4141 | gtgtgcgggc agcagctgtg tgcgggcctg ggggttgtta agtgcaatta tttttaataa |
| 4201 | aaggggcatt tggaaaaaaa aaaaaaaggt agcagtcgac agatgaattc tgcagatctg |
| 4261 | tggcttctag ctgcccgggt ggcatccctg tgacccctcc ccagtgcctc tcctggccct |
| 4321 | ggaagttgcc actccagtgc ccaccagcct tgtcctaata aaattaagtt gcatcatttt |
| 4381 | gtctgactag gtgtccttct ataatattat ggggtggagg ggggtggtat ggagcaaggg |
| 4441 | gcaagttggg aagacaacct gtagggcctg cggggtctat tgggaaccaa gctggagtgc |
| 4501 | agtggcacaa tcttggctca ctgcaatctc cgcctcctgg gttcaagcga ttctcctgcc |
| 4561 | tcagcctccc gagttgttgg gattccaggc atgcatgacc aggctcagct aatttttgtt |
| 4621 | tttttggtag agacggggtt tcaccatatt ggccaggctg gtctccaact cctaatctca |
| 4681 | ggtgatctac ccaccttggc ctcccaaatt gctgggatta caggcgtgaa ccactgctcc |
| 4741 | cttccctgtc cttctgattt taaaaaaaag agaaatgttc tggcacctgc acttgcactg |
| 4801 | gggacagcct attttgctag tttgttttgt ttcgttttgt tttgatggag agcgtatgtt |
| 4861 | gtttaaacgc ggccgcgtag ataagtagca tggcgggtta atcattaact acaaggaacc |
| 4921 | cctagtgatg gagttggcca ctccctctct gcgcgctcgc tcgctcactg aggccgggcg |
| 4981 | accaaaggtc gcccgacgcc cgggctttgc ccgggcggcc tcagtgagcg agcgagcgcg |
| 5041 | cagttaatta aggcgcccta ggccgaccct tagactctgt actcagttct ataaacgagc |
| 5101 | cattggatac gagatccgta gattgataag ggacacggaa tatccccgga cgcaatagac |
| 5161 | accggtggac agcttggtat cctgagcaca gtcgcgcgtc cgaatctagc tctactttag |
| 5221 | aggccccgga ttctgatggt cgtagaccgc agaaccgatt ggggggatga gatctactag |
| 5281 | ttatcagcac acaattgccc attatacgcg cgtataatgg actattgtgt gctgatatag |
| 5341 | ggataacagg gtaattctag agctagcata tggatccatc gatttgatgc ggtattttct |
| 5401 | ccttacgcat ctgtgcggta tttcacaccg catacgtcaa agcaaccata gtacgcgccc |
| 5461 | tgtagcggcg cattaagcgc ggcgggtgtg gtggttacgc gcagcgtgac cgctacactt |
| 5521 | gccagcgccc tagcgcccgc tcctttcgct ttcttccctt cctttctcgc cacgttcgcc |
| 5581 | ggctttcccc gtcaagctct aaatcggggg ctccctttag ggttccgatt tagtgcttta |
| 5641 | cggcacctcg accccaaaaa acttgatttg ggtgatggtt cacgtagtgg gccatcgccc |
| 5701 | tgatagacgg tttttcgccc tttgacgttg gagtccacgt tctttaatag tggactcttg |
| 5761 | ttccaaactg gaacaacact caactctatc tcgggctatt cttttgattt ataagggatt |
| 5821 | ttgccgattt cggtctattg gttaaaaaat gagctgattt aacaaaaatt taacgcgaat |
| 5881 | tttaacaaaa tattaacgtt tacaatttta tggtgcactc tcagtacaat ctgctctgat |
| 5941 | gccgcatagt taagccagcc ccgacacccg ccaacacccg ctgacgcgcc ctgacgggct |
| 6001 | tgtctgctcc cggcatccgc ttacagacaa gctgtgaccg tctccgggag ctgcatgtgt |
| 6061 | cagaggtttt caccgtcatc accgaaacgc gcgagacgaa agggcctcgt gatacgccta |
| 6121 | tttttatagg ttaatgtcat gataataatg gtttcttaga cgtcaggtgg cacttttcgg |
| 6181 | ggaaatgtgc gcggaacccc tatttgttta tttttctaaa tacattcaaa tatgtatccg |
| 6241 | ctcatgagac aataaccctg ataaatgctt caataatatt gaaaaaggaa gagtatgagc |
| 6301 | catattcaac gggaaacgtc gaggccgcga ttaaattcca acatggatgc tgatttatat |
| 6361 | gggtataaat gggctcgcga taatgtcggg caatcaggtg cgacaatcta tcgcttgtat |
| 6421 | gggaagcccg atgcgccaga gttgtttctg aaacatggca aaggtagcgt tgccaatgat |
| 6481 | gttacagatg agatggtcag actaaactgg ctgacggaat ttatgcctct tccgaccatc |
| 6541 | aagcatttta tccgtactcc tgatgatgca tggttactca ccactgcgat ccccggaaaa |
| 6601 | acagcattcc aggtattaga agaatatcct gattcaggtg aaaatattgt tgatgcgctg |
| 6661 | gcagtgttcc tgcgccggtt gcattcgatt cctgtttgta attgtccttt taacagcgat |
| 6721 | cgcgtatttc gtctcgctca ggcgcaatca cgaatgaata acggtttggt tgatgcgagt |
| 6781 | gattttgatg acgagcgtaa tggctggcct gttgaacaag tctggaaaga aatgcataaa |
| 6841 | cttttgccat tctcaccgga ttcagtcgtc actcatggtg atttctcact tgataacctt |
| 6901 | atttttgacg aggggaaatt aataggttgt attgatgttg gacgagtcgg aatcgcagac |
| 6961 | cgataccagg atcttgccat cctatggaac tgcctcggtg agttttctcc ttcattacag |
| 7021 | aaacggcttt ttcaaaaata tggtattgat aatcctgata tgaataaatt gcagtttcat |
| 7081 | ttgatgctcg atgagttttt ctaagcgtat aatggtctag agctagcata tggatccatc |
| 7141 | gattccatta tacgcctgtc agaccaagtt tactcatata tactttagat tgatttaaaa |
| 7201 | cttcattttt aatttaaaag gatctaggtg aagatccttt ttgataatct catgaccaaa |
| 7261 | atcccttaac gtgagttttc gttccactga gcgtcagacc ccgtagaaaa gatcaaagga |
| 7321 | tcttcttgag atcctttttt tctgcgcgta atctgctgct tgcaaacaaa aaaaccaccg |
| 7381 | ctaccagcgg tggtttgttt gccggatcaa gagctaccaa ctctttttcc gaaggtaact |
| 7441 | ggcttcagca gagcgcagat accaaatact gttcttctag tgtagccgta gttaggccac |
| 7501 | cacttcaaga actctgtagc accgcctaca tacctcgctc tgctaatcct gttaccagtg |
| 7561 | gctgctgcca gtggcgataa gtcgtgtctt accgggttgg actcaagacg atagttaccg |
| 7621 | gataaggcgc agcggtcggg ctgaacgggg ggttcgtgca cacagcccag cttggagcga |
| 7681 | acgacctaca ccgaactgag atacctacag cgtgagctat gagaaagcgc cacgcttccc |
| 7741 | gaagggagaa aggcggacag gtatccggta agcggcaggg tcggaacagg agagcgcacg |
| 7801 | agggagcttc cagggggaaa cgcctggtat ctttatagtc ctgtcgggtt tcgccacctc |
| 7861 | tgacttgagc gtcgattttt gtgatgctcg tcaggggggc ggagcctatg gaaaaacgcc |
| 7921 | agcaacgcgg cctttttacg gttcctggcc ttttgctggc cttttgctca catgt |

| pP083_seq100-IL2wt_5-56 deletion (SEQ ID NO: 488) | |
|---|---|
| (SEQ ID NO: 488) | |
| 1 | tctagagcta gcatatggat ccatcgattt agggataaca gggtaattat cagcacacaa |
| 61 | ttgcccatta tacgcgcgta taatggacta ttgtgtgctg atatctgtac acttaagggc |
| 121 | tagatcttag cttacgtcac tagagggtcc acgtttagtt tttaagatcc attgatctcc |
| 181 | taaacgctgc aagattcgca acctggtata cttagcctag gcgctaggtc ctagtgcagc |
| 241 | gggacttttt ttctaaagtc gttgagagga ggagtcgtca gaccagatag ctttgatgtc |
| 301 | ctgatcggaa ggatcgttgg cccccctgca ggcagctgtt aattaactgc gcgctcgctc |
| 361 | gctcactgag gccgcccggg caaagcccgg gcgtcgggcg acctttggtc gcccggcctc |
| 421 | agtgagcgag cgagcgcgca gagagggagt ggccaactcc atcactaggg gttccttgta |
| 481 | gttaatgatt aacccgccat gctacttatc tacggcgcgc cacgcgttct aggagttaat |
| 541 | ttttaaaaag cagtcaaaag tccaagtgcc cttgcgagca tttactctct ctgtttgctc |
| 601 | tggttaataa tctcaggagc acaaacattc cttactagtt ctaggagtta atttttaaaa |
| 661 | agcagtcaaa agtccaagtg cccttgcgag catttactct ctctgtttgc tctggttaat |
| 721 | aatctcagga gcacaaacat tccttactag ttctagagcg gccgccagtg tgctggaatt |
| 781 | cggctttttt agggctggaa gctacctttg acatcatttc ctctgcgaat gcatgtataa |
| 841 | tttctacaga acctattaga aaggatcacc cagcctctgc ttttgtacaa ctttccctta |
| 901 | aaaaactgcc aatcccactg ctgtttggcc caatagtgag aactttttcc tgctgcctct |
| 961 | tggtgctttt gcctatggcc cctattctgc ctgctgaaga cactcttgcc agcatggact |
| 1021 | taaacccctc cagctctgac aatcctcttt ctcttttgtt ttacatgaag ggtctggcag |
| 1081 | ccaaagcaat cactcaaagt tcaaacctta tcattttttg ctttgttcct cttggccttg |
| 1141 | gttttgtaca tcagctttga aaataccatc ccagggttaa tgctggggtt aatttataac |
| 1201 | tgagagtgct ctagttctgc aatacaggac atgctataaa aatggaaaga tgttgctttc |
| 1261 | tgagagatca ggtggattct tgggcatttg cttaagcttg gtaccgccac catgggggtg |
| 1321 | aggtacagaa tgcagctgct gtcctgcatt gcactgtcac tggcactggt taccaactca |
| 1381 | cagcaggggg ccagcaggcc aggccccagg gatgcccagg cccaccctgg cagacccagg |
| 1441 | gctgtgccca cccagtgtga tgtgcctccc aacagcagat ttgactgtgc ccctgataag |
| 1501 | gccattactc aggaacagtg tgaggccagg ggctgctgct atatccctgc caagcagggc |
| 1561 | ctgcaggggg cccagatggg gcagccctgg tgcttcttcc cccccagcta cccctcttat |
| 1621 | aagctggaga atctgagcag ctctgaaatg ggctacactg ccactctgac caggactacc |
| 1681 | cccaccttct tccccaagga tattctgact ctgaggctgg atgtgatgat ggagactgag |
| 1741 | aacaggctgc acttcaccat caaggaccct gccaacagga ggtatgaggt gcccctggaa |
| 1801 | actcccaggg tgcactctag ggcccccagc cccctgtatt ctgtggagtt ctctgaggag |
| 1861 | ccttttgggg tcattgtcca caggcagctg gatggcaggg tgctgctgaa tactactgtg |
| 1921 | gcccctctgt tctttgctga ccagttcctg cagctgagca ccagcctgcc ttctcagtac |
| 1981 | attactggcc tggctgagca tctgagcccc ctgatgctga gcacctcttg gaccagaatc |
| 2041 | accctgtgga acagggacct ggctcccact cctggggcca acctgtatgg cagccacccc |
| 2101 | ttctacctgg ccctggagga tgggggctct gcccatgggg tgttcctgct gaacagcaat |
| 2161 | gccatggatg tggtgctgca gccctctcct gccctgtctt ggagatctac tgggggcatc |
| 2221 | ctggatgtgt atatcttcct ggggcctgag cccaagtctg tggtgcagca gtacctggat |
| 2281 | gtggtgggct accccttcat gcccccctac tggggcctgg gcttccacct gtgcaggtgg |
| 2341 | ggctactctt ctactgctat caccaggcag gtggtggaga acatgaccag ggctcacttc |
| 2401 | cctctggatg tgcagtggaa tgacctggac tacatggact ctaggagaga cttcactttt |
| 2461 | aataaggatg ggttcaggga ctttcctgcc atggtgcagg agctgcatca ggggggcagg |
| 2521 | agatatatga tgattgtgga ccctgctatt tctagctctg gccctgctgg cagctatagg |
| 2581 | ccctatgatg aggggctgag gaggggggtg ttcatcacta atgagactgg ccagcccctg |
| 2641 | attggcaagg tgtggcctgg ctctactgcc ttccctgatt tcaccaaccc cactgccctg |
| 2701 | gcctggtggg aggatatggt ggctgagttt catgaccagg tgccctttga tggcatgtgg |
| 2761 | attgacatga atgagcccag caactttatc aggggctctg aagatggctg ccccaacaat |
| 2821 | gagctggaga acccccccta tgtgcctggg gtggtggggg gcaccctgca ggctgccacc |
| 2881 | atctgtgcca gcagccacca gttcctgagc acccactata acctgcacaa cctgtatggc |
| 2941 | ctgactgagg ccattgcctc tcacagggcc ctggtgaagg ctagggggac taggcccttt |
| 3001 | gtgatcagca ggtctacttt tgctggccat ggcaggtatg ctgggcactg gactggggat |
| 3061 | gtgtggtcta gctgggagca gctggccagc tctgtgcctg agatcctgca gtttaatctg |
| 3121 | ctgggggtgc ccctggtggg ggctgatgtg tgtggcttcc tgggcaatac ctctgaggag |
| 3181 | ctgtgtgtga ggtggactca gctgggggct ttctacccct tcatgagaaa ccacaactct |
| 3241 | ctgctgagcc tgccccagga gccctattct ttttctgagc ctgcccagca ggctatgagg |
| 3301 | aaggccctga ctctgaggta tgccctgctg ccccacctgt ataccctgtt ccatcaggcc |
| 3361 | catgtggctg gggagactgt ggccagacct ctgttcctgg agttccccaa ggatagctct |
| 3421 | acttggactg tggaccacca gctgctgtgg ggggaggctc tgctgatcac ccctgtgctg |
| 3481 | caggctggga aggctgaggt gactggctat ttccccctgg gcacctggta tgatctgcag |
| 3541 | actgtgccca ttgaggccct gggctctctg ccccctcccc ctgctgcccc cagggagcct |
| 3601 | gccatccact ctgagggcca gtgggtgacc ctgcctgccc ctctggacac tatcaatgtg |
| 3661 | cacctgaggg ctggctacat catccccctg cagggccctg gcctgactac cactgagtct |
| 3721 | aggcagcagc ccatggccct ggctgtggct ctgaccaagg ggggggaggc caggggggag |
| 3781 | ctgttctggg atgatgggga gtctctggag gtgctggaga ggggggccta cacccaggtg |
| 3841 | atcttcctgg ctaggaataa caccattgtc aatgagctgg tgagggtgac ctctgagggg |
| 3901 | gctggcctgc agctgcagaa ggtgactgtg ctgggggtgg ctactgcccc ccagcaggtg |
| 3961 | ctgagcaatg gggtgcctgt gagcaacttc acctatagcc ctgacaccaa ggtgctggac |
| 4021 | atctgtgtga gcctgctgat gggggagcag ttcctggtga gctggtgcta atttaaatct |
| 4081 | cgagccgggc ggagtgtgtt agtctctcca gagggaggct ggttccccag ggaagcagag |
| 4141 | cctgtgtgcg ggcagcagct gtgtgcgggc ctgggggttg ttaagtgcaa ttatttttaa |
| 4201 | taaaaggggc atttggaaaa aaaaaaaaaa ggtagcagtc gacagatgaa ttctgcagat |
| 4261 | ctgtggcttc tagctgcccg ggtggcatcc ctgtgacccc tccccagtgc ctctcctggc |
| 4321 | cctggaagtt gccactccag tgcccaccag ccttgtccta ataaaattaa gttgcatcat |
| 4381 | tttgtctgac taggtgtcct tctataatat tatggggtgg aggggggtgg tatggagcaa |
| 4441 | ggggcaagtt gggaagacaa cctgtagggc ctgcggggtc tattgggaac caagctggag |
| 4501 | tgcagtggca caatcttggc tcactgcaat ctccgcctcc tgggttcaag cgattctcct |
| 4561 | gcctcagcct cccgagttgt tgggattcca ggcatgcatg accaggctca gctaattttt |
| 4621 | gtttttttgg tagagacggg gtttcaccat attggccagg ctggtctcca actcctaatc |
| 4681 | tcaggtgatc tacccacctt ggcctcccaa attgctggga ttacaggcgt gaaccactgc |
| 4741 | tcccttccct gtccttctga ttttaaaaaa aagagaaatg ttctggcacc tgcacttgca |
| 4801 | ctggggacag cctattttgc tagtttgttt tgtttcgttt tgttttgatg gagagcgtat |
| 4861 | gttgtttaaa cgcggccgcg tagataagta gcatggcggg ttaatcatta actacaagga |
| 4921 | acccctagtg atggagttgg ccactccctc tctgcgcgct cgctcgctca ctgaggccgg |
| 4981 | gcgaccaaag gtcgcccgac gcccgggctt tgcccgggcg gcctcagtga gcgagcgagc |
| 5041 | gcgcagttaa ttaaggcgcc ctaggccgac ccttagactc tgtactcagt tctataaacg |
| 5101 | agccattgga tacgagatcc gtagattgat aagggacacg gaatatcccc ggacgcaata |
| 5161 | gacaccggtg gacagcttgg tatcctgagc acagtcgcgc gtccgaatct agctctactt |
| 5221 | tagaggcccc ggattctgat ggtcgtagac cgcagaaccg attgggggga tgagatctac |
| 5281 | tagttatcag cacacaattg cccattatac gcgcgtataa tggactattg tgtgctgata |
| 5341 | tagggataac agggtaattc tagagctagc atatggatcc atcgatttga tgcggtattt |
| 5401 | tctccttacg catctgtgcg gtatttcaca ccgcatacgt caaagcaacc atagtacgcg |
| 5461 | ccctgtagcg gcgcattaag cgcggcgggt gtggtggtta cgcgcagcgt gaccgctaca |
| 5521 | cttgccagcg ccctagcgcc cgctcctttc gctttcttcc cttcctttct cgccacgttc |
| 5581 | gccggctttc cccgtcaagc tctaaatcgg gggctccctt tagggttccg atttagtgct |
| 5641 | ttacggcacc tcgaccccaa aaaacttgat ttgggtgatg gttcacgtag tgggccatcg |
| 5701 | ccctgataga cggtttttcg ccctttgacg ttggagtcca cgttctttaa tagtggactc |
| 5761 | ttgttccaaa ctggaacaac actcaactct atctcgggct attcttttga tttataaggg |
| 5821 | attttgccga tttcggtcta ttggttaaaa aatgagctga tttaacaaaa atttaacgcg |
| 5881 | aattttaaca aaatattaac gtttacaatt ttatggtgca ctctcagtac aatctgctct |
| 5941 | gatgccgcat agttaagcca gccccgacac ccgccaacac ccgctgacgc gccctgacgg |
| 6001 | gcttgtctgc tcccggcatc cgcttacaga caagctgtga ccgtctccgg gagctgcatg |
| 6061 | tgtcagaggt tttcaccgtc atcaccgaaa cgcgcgagac gaaagggcct cgtgatacgc |
| 6121 | ctatttttat aggttaatgt catgataata atggtttctt agacgtcagg tggcactttt |
| 6181 | cggggaaatg tgcgcggaac ccctatttgt ttatttttct aaatacattc aaatatgtat |
| 6241 | ccgctcatga gacaataacc ctgataaatg cttcaataat attgaaaaag gaagagtatg |
| 6301 | agccatattc aacgggaaac gtcgaggccg cgattaaatt ccaacatgga tgctgattta |
| 6361 | tatgggtata aatgggctcg cgataatgtc gggcaatcag gtgcgacaat ctatcgcttg |
| 6421 | tatgggaagc ccgatgcgcc agagttgttt ctgaaacatg gcaaaggtag cgttgccaat |
| 6481 | gatgttacag atgagatggt cagactaaac tggctgacgg aatttatgcc tcttccgacc |
| 6541 | atcaagcatt ttatccgtac tcctgatgat gcatggttac tcaccactgc gatccccgga |
| 6601 | aaaacagcat tccaggtatt agaagaatat cctgattcag gtgaaaatat tgttgatgcg |
| 6661 | ctggcagtgt tcctgcgccg gttgcattcg attcctgttt gtaattgtcc ttttaacagc |
| 6721 | gatcgcgtat ttcgtctcgc tcaggcgcaa tcacgaatga ataacggttt ggttgatgcg |
| 6781 | agtgattttg atgacgagcg taatggctgg cctgttgaac aagtctggaa agaaatgcat |
| 6841 | aaacttttgc cattctcacc ggattcagtc gtcactcatg gtgatttctc acttgataac |
| 6901 | cttatttttg acgaggggaa attaataggt tgtattgatg ttggacgagt cggaatcgca |
| 6961 | gaccgatacc aggatcttgc catcctatgg aactgcctcg gtgagttttc tccttcatta |
| 7021 | cagaaacggc tttttcaaaa atatggtatt gataatcctg atatgaataa attgcagttt |
| 7081 | catttgatgc tcgatgagtt tttctaagcg tataatggtc tagagctagc atatggatcc |
| 7141 | atcgattcca ttatacgcct gtcagaccaa gtttactcat atatacttta gattgattta |
| 7201 | aaacttcatt tttaatttaa aaggatctag gtgaagatcc tttttgataa tctcatgacc |
| 7261 | aaaatccctt aacgtgagtt ttcgttccac tgagcgtcag accccgtaga aaagatcaaa |
| 7321 | ggatcttctt gagatccttt ttttctgcgc gtaatctgct gcttgcaaac aaaaaaacca |
| 7381 | ccgctaccag cggtggtttg tttgccggat caagagctac caactctttt tccgaaggta |
| 7441 | actggcttca gcagagcgca gataccaaat actgttcttc tagtgtagcc gtagttaggc |
| 7501 | caccacttca agaactctgt agcaccgcct acatacctcg ctctgctaat cctgttacca |
| 7561 | gtggctgctg ccagtggcga taagtcgtgt cttaccgggt tggactcaag acgatagtta |
| 7621 | ccggataagg cgcagcggtc gggctgaacg gggggttcgt gcacacagcc cagcttggag |
| 7681 | cgaacgacct acaccgaact gagataccta cagcgtgagc tatgagaaag cgccacgctt |
| 7741 | cccgaaggga gaaagcggga caggtatccg gtaagcggca gggtcggaac aggagagcgc |
| 7801 | acgagggagc ttccaggggg aaacgcctgg tatctttata gtcctgtcgg gtttcgccac |
| 7861 | ctctgacttg agcgtcgatt tttgtgatgc tcgtcagggg ggcggagcct atggaaaaac |
| 7921 | gccagcaacg cggccttttt acggttcctg gccttttgct ggccttttgc tcacatgt |

| pP084_seq100-201Ig_5-56 deletion (SEQ ID NO: 489) | |
|---|---|
| (SEQ ID NO: 489) | |
| 1 | tctagagcta gcatatggat ccatcgattt agggataaca gggtaattat cagcacacaa |
| 61 | ttgcccatta tacgcgcgta taatggacta ttgtgtgctg atatctgtac acttaagggc |
| 121 | tagatcttag cttacgtcac tagagggtcc acgtttagtt tttaagatcc attgatctcc |
| 181 | taaacgctgc aagattcgca acctggtata cttagcctag gcgctaggtc ctagtgcagc |
| 241 | gggacttttt ttctaaagtc gttgagagga ggagtcgtca gaccagatag ctttgatgtc |
| 301 | ctgatcggaa ggatcgttgg cccccctgca ggcagctgtt aattaactgc gcgctcgctc |
| 361 | gctcactgag gccgcccggg caaagcccgg gcgtcgggcg acctttggtc gcccggcctc |
| 421 | agtgagcgag cgagcgcgca gagagggagt ggccaactcc atcactaggg gttccttgta |
| 481 | gttaatgatt aacccgccat gctacttatc tacggcgcgc cacgcgttct aggagttaat |
| 541 | ttttaaaaag cagtcaaaag tccaagtgcc cttgcgagca tttactctct ctgtttgctc |
| 601 | tggttaataa tctcaggagc acaaacattc cttactagtt ctaggagtta atttttaaaa |
| 661 | agcagtcaaa agtccaagtg cccttgcgag catttactct ctctgtttgc tctggttaat |
| 721 | aatctcagga gcacaaacat tccttactag ttctagagcg gccgccagtg tgctggaatt |
| 781 | cggctttttt agggctggaa gctacctttg acatcatttc ctctgcgaat gcatgtataa |
| 841 | tttctacaga acctattaga aaggatcacc cagcctctgc ttttgtacaa ctttccctta |
| 901 | aaaaactgcc aatcccactg ctgtttggcc caatagtgag aactttttcc tgctgcctct |
| 961 | tggtgctttt gcctatggcc cctattctgc ctgctgaaga cactcttgcc agcatggact |
| 1021 | taaacccctc cagctctgac aatcctcttt ctcttttgtt ttacatgaag ggtctggcag |
| 1081 | ccaaagcaat cactcaaagt tcaaacctta tcattttttg ctttgttcct cttggccttg |
| 1141 | gttttgtaca tcagctttga aaataccatc ccagggttaa tgctggggtt aatttataac |
| 1201 | tgagagtgct ctagttctgc aatacaggac atgctataaa aatggaaaga tgttgctttc |
| 1261 | tgagagatca ggtggattct tgggcatttg cttaagcttg gtaccgccac catgggggtg |
| 1321 | agggagtttg ggctgagctg ggtctttctg gtggccctgc tgaagggagt ccagtgtgag |
| 1381 | cagcaggggg ccagcaggcc aggccccagg gatgcccagg cccaccctgg cagacccagg |
| 1441 | gctgtgccca cccagtgtga tgtgcctccc aacagcagat ttgactgtgc ccctgataag |
| 1501 | gccattactc aggaacagtg tgaggccagg ggctgctgct atatccctgc caagcagggc |
| 1561 | ctgcaggggg cccagatggg gcagccctgg tgcttcttcc cccccagcta cccctcttat |
| 1621 | aagctggaga atctgagcag ctctgaaatg ggctacactg ccactctgac caggactacc |
| 1681 | cccaccttct tccccaagga tattctgact ctgaggctgg atgtgatgat ggagactgag |
| 1741 | aacaggctgc acttcaccat caaggaccct gccaacagga ggtatgaggt gcccctggaa |
| 1801 | actcccaggg tgcactctag ggcccccagc cccctgtatt ctgtggagtt ctctgaggag |
| 1861 | ccttttgggg tcattgtcca caggcagctg gatggcaggg tgctgctgaa tactactgtg |
| 1921 | gcccctctgt tctttgctga ccagttcctg cagctgagca ccagcctgcc ttctcagtac |
| 1981 | attactggcc tggctgagca tctgagcccc ctgatgctga gcacctcttg gaccagaatc |
| 2041 | accctgtgga acagggacct ggctcccact cctggggcca acctgtatgg cagccacccc |
| 2101 | ttctacctgg ccctggagga tgggggctct gcccatgggg tgttcctgct gaacagcaat |
| 2161 | gccatggatg tggtgctgca gccctctcct gccctgtctt ggagatctac tgggggcatc |
| 2221 | ctggatgtgt atatcttcct ggggcctgag cccaagtctg tggtgcagca gtacctggat |
| 2281 | gtggtgggct accccttcat gcccccctac tggggcctgg gcttccacct gtgcaggtgg |
| 2341 | ggctactctt ctactgctat caccaggcag gtggtggaga acatgaccag ggctcacttc |
| 2401 | cctctggatg tgcagtggaa tgacctggac tacatggact ctaggagaga cttcactttt |
| 2461 | aataaggatg ggttcaggga ctttcctgcc atggtgcagg agctgcatca ggggggcagg |
| 2521 | agatatatga tgattgtgga ccctgctatt tctagctctg gccctgctgg cagctatagg |
| 2581 | ccctatgatg aggggctgag gaggggggtg ttcatcacta atgagactgg ccagcccctg |
| 2641 | attggcaagg tgtggcctgg ctctactgcc ttccctgatt tcaccaaccc cactgccctg |
| 2701 | gcctggtggg aggatatggt ggctgagttt catgaccagg tgccctttga tggcatgtgg |
| 2761 | attgacatga atgagcccag caactttatc aggggctctg aagatggctg ccccaacaat |
| 2821 | gagctggaga acccccccta tgtgcctggg gtggtggggg gcaccctgca ggctgccacc |
| 2881 | atctgtgcca gcagccacca gttcctgagc acccactata acctgcacaa cctgtatggc |
| 2941 | ctgactgagg ccattgcctc tcacagggcc ctggtgaagg ctagggggac taggcccttt |
| 3001 | gtgatcagca ggtctacttt tgctggccat ggcaggtatg ctgggcactg gactggggat |
| 3061 | gtgtggtcta gctgggagca gctggccagc tctgtgcctg agatcctgca gtttaatctg |
| 3121 | ctgggggtgc ccctggtggg ggctgatgtg tgtggcttcc tgggcaatac ctctgaggag |
| 3181 | ctgtgtgtga ggtggactca gctgggggct ttctacccct tcatgagaaa ccacaactct |
| 3241 | ctgctgagcc tgccccagga gccctattct ttttctgagc ctgcccagca ggctatgagg |
| 3301 | aaggccctga ctctgaggta tgccctgctg ccccacctgt ataccctgtt ccatcaggcc |
| 3361 | catgtggctg gggagactgt ggccagacct ctgttcctgg agttccccaa ggatagctct |
| 3421 | acttggactg tggaccacca gctgctgtgg ggggaggctc tgctgatcac ccctgtgctg |
| 3481 | caggctggga aggctgaggt gactggctat ttccccctgg gcacctggta tgatctgcag |
| 3541 | actgtgccca ttgaggccct gggctctctg ccccctcccc ctgctgcccc cagggagcct |
| 3601 | gccatccact ctgagggcca gtgggtgacc ctgcctgccc ctctggacac tatcaatgtg |
| 3661 | cacctgaggg ctggctacat catccccctg cagggccctg gcctgactac cactgagtct |
| 3721 | aggcagcagc ccatggccct ggctgtggct ctgaccaagg ggggggaggc caggggggag |
| 3781 | ctgttctggg atgatgggga gtctctggag gtgctggaga ggggggccta cacccaggtg |
| 3841 | atcttcctgg ctaggaataa caccattgtc aatgagctgg tgagggtgac ctctgagggg |
| 3901 | gctggcctgc agctgcagaa ggtgactgtg ctgggggtgg ctactgcccc ccagcaggtg |
| 3961 | ctgagcaatg gggtgcctgt gagcaacttc acctatagcc ctgacaccaa ggtgctggac |
| 4021 | atctgtgtga gcctgctgat gggggagcag ttcctggtga gctggtgcta atttaaatct |
| 4081 | cgagccgggc ggagtgtgtt agtctctcca gagggaggct ggttccccag ggaagcagag |
| 4141 | cctgtgtgcg ggcagcagct gtgtgcgggc ctgggggttg ttaagtgcaa ttatttttaa |
| 4201 | taaaaggggc atttggaaaa aaaaaaaaaa ggtagcagtc gacagatgaa ttctgcagat |
| 4261 | ctgtggcttc tagctgcccg ggtggcatcc ctgtgacccc tccccagtgc ctctcctggc |
| 4321 | cctggaagtt gccactccag tgcccaccag ccttgtccta ataaaattaa gttgcatcat |
| 4381 | tttgtctgac taggtgtcct tctataatat tatggggtgg aggggggtgg tatggagcaa |
| 4441 | ggggcaagtt gggaagacaa cctgtagggc ctgcggggtc tattgggaac caagctggag |
| 4501 | tgcagtggca caatcttggc tcactgcaat ctccgcctcc tgggttcaag cgattctcct |
| 4561 | gcctcagcct cccgagttgt tgggattcca ggcatgcatg accaggctca gctaattttt |
| 4621 | gtttttttgg tagagacggg gtttcaccat attggccagg ctggtctcca actcctaatc |
| 4681 | tcaggtgatc tacccacctt ggcctcccaa attgctggga ttacaggcgt gaaccactgc |
| 4741 | tcccttccct gtccttctga ttttaaaaaa aagagaaatg ttctggcacc tgcacttgca |
| 4801 | ctggggacag cctattttgc tagtttgttt tgtttcgttt tgttttgatg gagagcgtat |
| 4861 | gttgtttaaa cgcggccgcg tagataagta gcatggcggg ttaatcatta actacaagga |
| 4921 | acccctagtg atggagttgg ccactccctc tctgcgcgct cgctcgctca ctgaggccgg |
| 4981 | gcgaccaaag gtcgcccgac gcccgggctt tgcccgggcg gcctcagtga gcgagcgagc |
| 5041 | gcgcagttaa ttaaggcgcc ctaggccgac ccttagactc tgtactcagt tctataaacg |
| 5101 | agccattgga tacgagatcc gtagattgat aagggacacg gaatatcccc ggacgcaata |
| 5161 | gacaccggtg gacagcttgg tatcctgagc acagtcgcgc gtccgaatct agctctactt |
| 5221 | tagaggcccc ggattctgat ggtcgtagac cgcagaaccg attgggggga tgagatctac |
| 5281 | tagttatcag cacacaattg cccattatac gcgcgtataa tggactattg tgtgctgata |
| 5341 | tagggataac agggtaattc tagagctagc atatggatcc atcgatttga tgcggtattt |
| 5401 | tctccttacg catctgtgcg gtatttcaca ccgcatacgt caaagcaacc atagtacgcg |
| 5461 | ccctgtagcg gcgcattaag cgcggcgggt gtggtggtta cgcgcagcgt gaccgctaca |
| 5521 | cttgccagcg ccctagcgcc cgctcctttc gctttcttcc cttcctttct cgccacgttc |
| 5581 | gccggctttc cccgtcaagc tctaaatcgg gggctccctt tagggttccg atttagtgct |
| 5641 | ttacggcacc tcgaccccaa aaaacttgat ttgggtgatg gttcacgtag tgggccatcg |
| 5701 | ccctgataga cggtttttcg ccctttgacg ttggagtcca cgttctttaa tagtggactc |
| 5761 | ttgttccaaa ctggaacaac actcaactct atctcgggct attcttttga tttataaggg |
| 5821 | attttgccga tttcggtcta ttggttaaaa aatgagctga tttaacaaaa atttaacgcg |
| 5881 | aattttaaca aaatattaac gtttacaatt ttatggtgca ctctcagtac aatctgctct |
| 5941 | gatgccgcat agttaagcca gccccgacac ccgccaacac ccgctgacgc gccctgacgg |
| 6001 | gcttgtctgc tcccggcatc cgcttacaga caagctgtga ccgtctccgg gagctgcatg |
| 6061 | tgtcagaggt tttcaccgtc atcaccgaaa cgcgcgagac gaaagggcct cgtgatacgc |
| 6121 | ctatttttat aggttaatgt catgataata atggtttctt agacgtcagg tggcactttt |
| 6181 | cggggaaatg tgcgcggaac ccctatttgt ttatttttct aaatacattc aaatatgtat |
| 6241 | ccgctcatga gacaataacc ctgataaatg cttcaataat attgaaaaag gaagagtatg |
| 6301 | agccatattc aacgggaaac gtcgaggccg cgattaaatt ccaacatgga tgctgattta |
| 6361 | tatgggtata aatgggctcg cgataatgtc gggcaatcag gtgcgacaat ctatcgcttg |
| 6421 | tatgggaagc ccgatgcgcc agagttgttt ctgaaacatg gcaaaggtag cgttgccaat |
| 6481 | gatgttacag atgagatggt cagactaaac tggctgacgg aatttatgcc tcttccgacc |
| 6541 | atcaagcatt ttatccgtac tcctgatgat gcatggttac tcaccactgc gatccccgga |
| 6601 | aaaacagcat tccaggtatt agaagaatat cctgattcag gtgaaaatat tgttgatgcg |
| 6661 | ctggcagtgt tcctgcgccg gttgcattcg attcctgttt gtaattgtcc ttttaacagc |
| 6721 | gatcgcgtat ttcgtctcgc tcaggcgcaa tcacgaatga ataacggttt ggttgatgcg |
| 6781 | agtgattttg atgacgagcg taatggctgg cctgttgaac aagtctggaa agaaatgcat |
| 6841 | aaacttttgc cattctcacc ggattcagtc gtcactcatg gtgatttctc acttgataac |
| 6901 | cttatttttg acgaggggaa attaataggt tgtattgatg ttggacgagt cggaatcgca |
| 6961 | gaccgatacc aggatcttgc catcctatgg aactgcctcg gtgagttttc tccttcatta |
| 7021 | cagaaacggc tttttcaaaa atatggtatt gataatcctg atatgaataa attgcagttt |
| 7081 | catttgatgc tcgatgagtt tttctaagcg tataatggtc tagagctagc atatggatcc |
| 7141 | atcgattcca ttatacgcct gtcagaccaa gtttactcat atatacttta gattgattta |
| 7201 | aaacttcatt tttaatttaa aaggatctag gtgaagatcc tttttgataa tctcatgacc |
| 7261 | aaaatccctt aacgtgagtt ttcgttccac tgagcgtcag accccgtaga aaagatcaaa |
| 7321 | ggatcttctt gagatccttt ttttctgcgc gtaatctgct gcttgcaaac aaaaaaacca |
| 7381 | ccgctaccag cggtggtttg tttgccggat caagagctac caactctttt tccgaaggta |
| 7441 | actggcttca gcagagcgca gataccaaat actgttcttc tagtgtagcc gtagttaggc |
| 7501 | caccacttca agaactctgt agcaccgcct acatacctcg ctctgctaat cctgttacca |
| 7561 | gtggctgctg ccagtggcga taagtcgtgt cttaccgggt tggactcaag acgatagtta |
| 7621 | ccggataagg cgcagcggtc gggctgaacg gggggttcgt gcacacagcc cagcttggag |
| 7681 | cgaacgacct acaccgaact gagataccta cagcgtgagc tatgagaaag cgccacgctt |
| 7741 | cccgaaggga gaaaggcgga caggtatccg gtaagcggca gggtcggaac aggagagcgc |
| 7801 | acgagggagc ttccaggggg aaacgcctgg tatctttata gtcctgtcgg gtttcgccac |
| 7861 | ctctgacttg agcgtcgatt tttgtgatgc tcgtcagggg ggcggagcct atggaaaaac |
| 7921 | gccagcaacg cggccttttt acggttcctg gccttttgct ggccttttgc tcacatgt |

| pP085_seq3-IL2wt_5-56 deletion (SEQ ID NO: 490) | |
|---|---|
| (SEQ ID NO: 490) | |
| 1 | tctagagcta gcatatggat ccatcgattt agggataaca gggtaattat cagcacacaa |
| 61 | ttgcccatta tacgcgcgta taatggacta ttgtgtgctg atatctgtac acttaagggc |
| 121 | tagatcttag cttacgtcac tagagggtcc acgtttagtt tttaagatcc attgatctcc |
| 181 | taaacgctgc aagattcgca acctggtata cttagcctag gcgctaggtc ctagtgcagc |
| 241 | gggacttttt ttctaaagtc gttgagagga ggagtcgtca gaccagatag ctttgatgtc |
| 301 | ctgatcggaa ggatcgttgg cccccctgca ggcagctgtt aattaactgc gcgctcgctc |
| 361 | gctcactgag gccgcccggg caaagcccgg gcgtcgggcg acctttggtc gcccggcctc |
| 421 | agtgagcgag cgagcgcgca gagagggagt ggccaactcc atcactaggg gttccttgta |
| 481 | gttaatgatt aacccgccat gctacttatc tacggcgcgc cacgcgttct aggagttaat |
| 541 | ttttaaaaag cagtcaaaag tccaagtgcc cttgcgagca tttactctct ctgtttgctc |
| 601 | tggttaataa tctcaggagc acaaacattc cttactagtt ctaggagtta atttttaaaa |
| 661 | agcagtcaaa agtccaagtg cccttgcgag catttactct ctctgtttgc tctggttaat |
| 721 | aatctcagga gcacaaacat tccttactag ttctagagcg gccgccagtg tgctggaatt |
| 781 | cggctttttt agggctggaa gctacctttg acatcatttc ctctgcgaat gcatgtataa |
| 841 | tttctacaga acctattaga aaggatcacc cagcctctgc ttttgtacaa ctttccctta |
| 901 | aaaaactgcc aatcccactg ctgtttggcc caatagtgag aactttttcc tgctgcctct |
| 961 | tggtgctttt gcctatggcc cctattctgc ctgctgaaga cactcttgcc agcatggact |
| 1021 | taaacccctc cagctctgac aatcctcttt ctcttttgtt ttacatgaag ggtctggcag |
| 1081 | ccaaagcaat cactcaaagt tcaaacctta tcattttttg ctttgttcct cttggccttg |
| 1141 | gttttgtaca tcagctttga aaataccatc ccagggttaa tgctggggtt aatttataac |
| 1201 | tgagagtgct ctagttctgc aatacaggac atgctataaa aatggaaaga tgttgctttc |
| 1261 | tgagagatca ggtggattct tgggcatttg cttaagcttg gtaccgccac catgggggtg |
| 1321 | aggtacagaa tgcagctgct gtcctgcatt gcactgtcac tggcactggt taccaactca |
| 1381 | cagcagggag cttctagacc tggacctaga gatgctcagg ctcatcctgg aagacctaga |
| 1441 | gctgtgccta cacagtgtga tgtgcctcct aattctagat ttgattgtgc tcctgataag |
| 1501 | gctataacac aggagcagtg tgaggctaga ggatgttgtt atattcctgc taagcaggga |
| 1561 | ctgcagggag ctcagatggg acagccttgg tgtttttttc ctccttctta tccttcttat |
| 1621 | aagctggaga atctgtcttc ttctgagatg ggatatacag ctacactgac aagaacaaca |
| 1681 | cctacatttt ttcctaagga tattctgaca ctgagactgg atgtgatgat ggagacagag |
| 1741 | aatagactgc attttacaat taaggatcct gctaatagaa gatatgaggt gcctctagag |
| 1801 | acacctagag tgcattctag agctccttct cctctgtatt ctgtggagtt ttctgaggag |
| 1861 | ccttttggag tgattgtgca tagacagctg gatggaagag tgctgctgaa tacaacagtg |
| 1921 | gctcctctgt tttttgctga tcagtttctg cagctgtcta catctctgcc ttctcagtat |
| 1981 | attacaggac tggctgagca tctgtctcct ctgatgctgt ctacatcttg gacaagaatt |
| 2041 | acactgtgga atagagatct ggctcctaca cctggagcta atctgtatgg atctcatcct |
| 2101 | ttttatctgg ctctggagga tggaggatct gctcatggag tgtttctgct gaattctaat |
| 2161 | gctatggatg tagtgctgca gccttctcct gctctgtctt ggagatctac aggaggaatt |
| 2221 | ctggatgtgt atatttttct aggacctgag cctaagtctg tggtgcagca gtatctggat |
| 2281 | gtagtgggat atccttttat gcctccttat tggggactgg gatttcatct gtgtagatgg |
| 2341 | ggatattctt ctacagctat tacaagacag gtggttgaga atatgacaag agctcatttt |
| 2401 | cctctggatg tgcagtggaa tgatctagat tatatggatt ctagaagaga ttttacattt |
| 2461 | aataaggatg gatttagaga ttttcctgct atggtgcagg agctgcatca gggaggaaga |
| 2521 | agatatatga tgattgtgga tcctgctatt tcttcttctg gacctgctgg atcttataga |
| 2581 | ccttatgatg agggactgag aagaggagtg tttattacaa atgagacagg acagcctctg |
| 2641 | attggaaagg tgtggcctgg atctacagct tttcctgatt ttacaaatcc tacagctctg |
| 2701 | gcttggtggg aggatatggt ggctgagttt catgatcagg tgccttttga tggaatgtgg |
| 2761 | attgatatga atgagccttc taattttata agaggatctg aggatggatg tcctaataat |
| 2821 | gagctagaga atcctcctta tgtgcctgga gtagtgggag gaacactgca ggctgctaca |
| 2881 | atttgtgctt cttctcatca gtttctgtct acacattata atctgcataa tctgtatgga |
| 2941 | ctgacagagg ctattgcttc tcatagagct ctggtgaagg ctagaggaac aagacctttt |
| 3001 | gtgatttcta gatctacatt tgctggacat ggaagatatg ctggacattg gacaggagat |
| 3061 | gtatggtctt cttgggagca gctagcttct tctgtgcctg agattctgca gtttaatctg |
| 3121 | ctaggagtgc ctctggtggg agctgatgtg tgtggatttc tgggaaatac atctgaggag |
| 3181 | ctgtgtgtga gatggacaca gctgggagct ttttatcctt ttatgagaaa tcataattct |
| 3241 | ctgctgtctc tgcctcagga gccttattct ttttctgagc ctgctcagca ggctatgaga |
| 3301 | aaggctctga cactgagata tgctctgctg cctcatctgt atacactgtt tcatcaggct |
| 3361 | catgtggctg gagagacagt agctagacct ctgtttctgg agtttcctaa ggattcttct |
| 3421 | acatggacag ttgatcatca gctgctgtgg ggagaggctc tgctgattac acctgtgctg |
| 3481 | caggctggaa aggctgaggt gacaggatat tttcctctgg gaacatggta tgatctgcag |
| 3541 | acagtgccta tagaggctct gggatctctg cctcctcctc ctgctgctcc tagagagcct |
| 3601 | gctattcatt ctgagggaca gtgggtgaca ctgcctgctc ctctggatac aattaatgtg |
| 3661 | catctgagag ctggatatat tattcctctg cagggacctg gactgacaac aacagagtct |
| 3721 | agacagcagc ctatggctct ggctgtggct ctgacaaagg gaggagaggc tagaggagag |
| 3781 | ctgttttggg atgatggaga gtctctggag gtgctggaga gaggagctta tacacaggtg |
| 3841 | atttttctgg ctagaaataa tacaattgtg aatgagctgg tgagagtgac atctgaggga |
| 3901 | gctggactgc agctgcagaa ggtgacagtg ctgggagtgg ctacagctcc tcagcaggtg |
| 3961 | ctgtctaatg gagtgcctgt gtctaatttt acatattctc ctgatacaaa ggtgctggat |
| 4021 | atttgtgtgt ctctgctgat gggagagcag tttctggtgt cttggtgtta atgatttaaa |
| 4081 | tctcgagccg ggcggagtgt gttagtctct ccagagggag gctggttccc cagggaagca |
| 4141 | gagcctgtgt gcgggcagca gctgtgtgcg ggcctggggg ttgttaagtg caattatttt |
| 4201 | taataaaagg ggcatttgga aaaaaaaaaa aaaggtagca gtcgacagat gaattctgca |
| 4261 | gatctgtggc ttctagctgc ccgggtggca tccctgtgac ccctccccag tgcctctcct |
| 4321 | ggccctggaa gttgccactc cagtgcccac cagccttgtc ctaataaaat taagttgcat |
| 4381 | cattttgtct gactaggtgt ccttctataa tattatgggg tggagggggg tggtatggag |
| 4441 | caaggggcaa gttgggaaga caacctgtag ggcctgcggg gtctattggg aaccaagctg |
| 4501 | gagtgcagtg gcacaatctt ggctcactgc aatctccgcc tcctgggttc aagcgattct |
| 4561 | cctgcctcag cctcccgagt tgttgggatt ccaggcatgc atgaccaggc tcagctaatt |
| 4621 | tttgtttttt tggtagagac ggggtttcac catattggcc aggctggtct ccaactccta |
| 4681 | atctcaggtg atctacccac cttggcctcc caaattgctg ggattacagg cgtgaaccac |
| 4741 | tgctcccttc cctgtccttc tgattttaaa aaaaagagaa atgttctggc acctgcactt |
| 4801 | gcactgggga cagcctattt tgctagtttg ttttgtttcg ttttgttttg atggagagcg |
| 4861 | tatgttgttt aaacgcggcc gcgtagataa gtagcatggc gggttaatca ttaactacaa |
| 4921 | ggaaccccta gtgatggagt tggccactcc ctctctgcgc gctcgctcgc tcactgaggc |
| 4981 | cgggcgacca aaggtcgccc gacgcccggg ctttgcccgg gcggcctcag tgagcgagcg |
| 5041 | agcgcgcagt taattaaggc gccctaggcc gacccttaga ctctgtactc agttctataa |
| 5101 | acgagccatt ggatacgaga tccgtagatt gataagggac acggaatatc cccggacgca |
| 5161 | atagacaccg gtggacagct tggtatcctg agcacagtcg cgcgtccgaa tctagctcta |
| 5221 | ctttagaggc cccggattct gatggtcgta gaccgcagaa ccgattgggg ggatgagatc |
| 5281 | tactagttat cagcacacaa ttgcccatta tacgcgcgta taatggacta ttgtgtgctg |
| 5341 | atatagggat aacagggtaa ttctagagct agcatatgga tccatcgatt tgatgcggta |
| 5401 | ttttctcctt acgcatctgt gcggtatttc acaccgcata cgtcaaagca accatagtac |
| 5461 | gcgccctgta gcggcgcatt aagcgcggcg ggtgtggtgg ttacgcgcag cgtgaccgct |
| 5521 | acacttgcca gcgccctagc gcccgctcct ttcgctttct tcccttcctt tctcgccacg |
| 5581 | ttcgccggct ttccccgtca agctctaaat cgggggctcc ctttagggtt ccgatttagt |
| 5641 | gctttacggc acctcgaccc caaaaaactt gatttgggtg atggttcacg tagtgggcca |
| 5701 | tcgccctgat agacggtttt tcgccctttg acgttggagt ccacgttctt taatagtgga |
| 5761 | ctcttgttcc aaactggaac aacactcaac tctatctcgg gctattcttt tgatttataa |
| 5821 | gggattttgc cgatttcggt ctattggtta aaaaatgagc tgatttaaca aaaatttaac |
| 5881 | gcgaatttta acaaaatatt aacgtttaca attttatggt gcactctcag tacaatctgc |
| 5941 | tctgatgccg catagttaag ccagccccga cacccgccaa cacccgctga cgcgccctga |
| 6001 | cgggcttgtc tgctcccggc atccgcttac agacaagctg tgaccgtctc cgggagctgc |
| 6061 | atgtgtcaga ggttttcacc gtcatcaccg aaacgcgcga gacgaaaggg cctcgtgata |
| 6121 | cgcctatttt tataggttaa tgtcatgata ataatggttt cttagacgtc aggtggcact |
| 6181 | tttcggggaa atgtgcgcgg aacccctatt tgtttatttt tctaaataca ttcaaatatg |
| 6241 | tatccgctca tgagacaata accctgataa atgcttcaat aatattgaaa aaggaagagt |
| 6301 | atgagccata ttcaacggga aacgtcgagg ccgcgattaa attccaacat ggatgctgat |
| 6361 | ttatatgggt ataaatgggc tcgcgataat gtcgggcaat caggtgcgac aatctatcgc |
| 6421 | ttgtatggga agcccgatgc gccagagttg tttctgaaac atggcaaagg tagcgttgcc |
| 6481 | aatgatgtta cagatgagat ggtcagacta aactggctga cggaatttat gcctcttccg |
| 6541 | accatcaagc attttatccg tactcctgat gatgcatggt tactcaccac tgcgatcccc |
| 6601 | ggaaaaacag cattccaggt attagaagaa tatcctgatt caggtgaaaa tattgttgat |
| 6661 | gcgctggcag tgttcctgcg ccggttgcat tcgattcctg tttgtaattg tccttttaac |
| 6721 | agcgatcgcg tatttcgtct cgctcaggcg caatcacgaa tgaataacgg tttggttgat |
| 6781 | gcgagtgatt ttgatgacga gcgtaatggc tggcctgttg aacaagtctg gaaagaaatg |
| 6841 | cataaacttt tgccattctc accggattca gtcgtcactc atggtgattt ctcacttgat |
| 6901 | aaccttattt ttgacgaggg gaaattaata ggttgtattg atgttggacg agtcggaatc |
| 6961 | gcagaccgat accaggatct tgccatccta tggaactgcc tcggtgagtt ttctccttca |
| 7021 | ttacagaaac ggctttttca aaaatatggt attgataatc ctgatatgaa taaattgcag |
| 7081 | tttcatttga tgctcgatga gtttttctaa gcgtataatg gtctagagct agcatatgga |
| 7141 | tccatcgatt ccattatacg cctgtcagac caagtttact catatatact ttagattgat |
| 7201 | ttaaaacttc atttttaatt taaaaggatc taggtgaaga tcctttttga taatctcatg |
| 7261 | accaaaatcc cttaacgtga gttttcgttc cactgagcgt cagaccccgt agaaaagatc |
| 7321 | aaaggatctt cttgagatcc tttttttctg cgcgtaatct gctgcttgca aacaaaaaaa |
| 7381 | ccaccgctac cagcggtggt ttgtttgccg gatcaagagc taccaactct ttttccgaag |
| 7441 | gtaactggct tcagcagagc gcagatacca aatactgttc ttctagtgta gccgtagtta |
| 7501 | ggccaccact tcaagaactc tgtagcaccg cctacatacc tcgctctgct aatcctgtta |
| 7561 | ccagtggctg ctgccagtgg cgataagtcg tgtcttaccg ggttggactc aagacgatag |
| 7621 | ttaccggata aggcgcagcg gtcgggctga acggggggtt cgtgcacaca gcccagcttg |
| 7681 | gagcgaacga cctacaccga actgagatac ctacagcgtg agctatgaga aagcgccacg |
| 7741 | cttcccgaag ggagaaaggc ggacaggtat ccggtaagcg gcagggtcgg aacaggagag |
| 7801 | cgcacgaggg agcttccagg gggaaacgcc tggtatcttt atagtcctgt cgggtttcgc |
| 7861 | cacctctgac ttgagcgtcg atttttgtga tgctcgtcag gggggcggag cctatggaaa |
| 7921 | aacgccagca acgcggcctt tttacggttc ctggcctttt gctggccttt tgctcacatg |
| 7981 | t |

| pP086_seq3-201Ig_5-56 deletion (SEQ ID NO: 491) | |
|---|---|
| (SEQ ID NO: 491) | |
| 1 | tctagagcta gcatatggat ccatcgattt agggataaca gggtaattat cagcacacaa |
| 61 | ttgcccatta tacgcgcgta taatggacta ttgtgtgctg atatctgtac acttaagggc |
| 121 | tagatcttag cttacgtcac tagagggtcc acgtttagtt tttaagatcc attgatctcc |
| 181 | taaacgctgc aagattcgca acctggtata cttagcctag gcgctaggtc ctagtgcagc |
| 241 | gggacttttt ttctaaagtc gttgagagga ggagtcgtca gaccagatag ctttgatgtc |
| 301 | ctgatcggaa ggatcgttgg cccccctgca ggcagctgtt aattaactgc gcgctcgctc |
| 361 | gctcactgag gccgcccggg caaagcccgg gcgtcgggcg acctttggtc gcccggcctc |
| 421 | agtgagcgag cgagcgcgca gagagggagt ggccaactcc atcactaggg gttccttgta |
| 481 | gttaatgatt aacccgccat gctacttatc tacggcgcgc cacgcgttct aggagttaat |
| 541 | ttttaaaaag cagtcaaaag tccaagtgcc cttgcgagca tttactctct ctgtttgctc |
| 601 | tggttaataa tctcaggagc acaaacattc cttactagtt ctaggagtta atttttaaaa |
| 661 | agcagtcaaa agtccaagtg cccttgcgag catttactct ctctgtttgc tctggttaat |
| 721 | aatctcagga gcacaaacat tccttactag ttctagagcg gccgccagtg tgctggaatt |
| 781 | cggctttttt agggctggaa gctacctttg acatcatttc ctctgcgaat gcatgtataa |
| 841 | tttctacaga acctattaga aaggatcacc cagcctctgc ttttgtacaa ctttccctta |
| 901 | aaaaactgcc aatcccactg ctgtttggcc caatagtgag aactttttcc tgctgcctct |
| 961 | tggtgctttt gcctatggcc cctattctgc ctgctgaaga cactcttgcc agcatggact |
| 1021 | taaacccctc cagctctgac aatcctcttt ctcttttgtt ttacatgaag ggtctggcag |
| 1081 | ccaaagcaat cactcaaagt tcaaacctta tcattttttg ctttgttcct cttggccttg |
| 1141 | gttttgtaca tcagctttga aaataccatc ccagggttaa tgctggggtt aatttataac |
| 1201 | tgagagtgct ctagttctgc aatacaggac atgctataaa aatggaaaga tgttgctttc |
| 1261 | tgagagatca ggtggattct tgggcatttg cttaagcttg gtaccgccac catgggggtg |
| 1321 | agggagtttg ggctgagctg ggtctttctg gtggccctgc tgaagggagt ccagtgtgag |
| 1381 | cagcagggag cttctagacc tggacctaga gatgctcagg ctcatcctgg aagacctaga |
| 1441 | gctgtgccta cacagtgtga tgtgcctcct aattctagat ttgattgtgc tcctgataag |
| 1501 | gctataacac aggagcagtg tgaggctaga ggatgttgtt atattcctgc taagcaggga |
| 1561 | ctgcagggag ctcagatggg acagccttgg tgtttttttc ctccttctta tccttcttat |
| 1621 | aagctggaga atctgtcttc ttctgagatg ggatatacag ctacactgac aagaacaaca |
| 1681 | cctacatttt ttcctaagga tattctgaca ctgagactgg atgtgatgat ggagacagag |
| 1741 | aatagactgc attttacaat taaggatcct gctaatagaa gatatgaggt gcctctagag |
| 1801 | acacctagag tgcattctag agctccttct cctctgtatt ctgtggagtt ttctgaggag |
| 1861 | ccttttggag tgattgtgca tagacagctg gatggaagag tgctgctgaa tacaacagtg |
| 1921 | gctcctctgt tttttgctga tcagtttctg cagctgtcta catctctgcc ttctcagtat |
| 1981 | attacaggac tggctgagca tctgtctcct ctgatgctgt ctacatcttg gacaagaatt |
| 2041 | acactgtgga atagagatct ggctcctaca cctggagcta atctgtatgg atctcatcct |
| 2101 | ttttatctgg ctctggagga tggaggatct gctcatggag tgtttctgct gaattctaat |
| 2161 | gctatggatg tagtgctgca gccttctcct gctctgtctt ggagatctac aggaggaatt |
| 2221 | ctggatgtgt atatttttct aggacctgag cctaagtctg tggtgcagca gtatctggat |
| 2281 | gtagtgggat atccttttat gcctccttat tggggactgg gatttcatct gtgtagatgg |
| 2341 | ggatattctt ctacagctat tacaagacag gtggttgaga atatgacaag agctcatttt |
| 2401 | cctctggatg tgcagtggaa tgatctagat tatatggatt ctagaagaga ttttacattt |
| 2461 | aataaggatg gatttagaga ttttcctgct atggtgcagg agctgcatca gggaggaaga |
| 2521 | agatatatga tgattgtgga tcctgctatt tcttcttctg gacctgctgg atcttataga |
| 2581 | ccttatgatg agggactgag aagaggagtg tttattacaa atgagacagg acagcctctg |
| 2641 | attggaaagg tgtggcctgg atctacagct tttcctgatt ttacaaatcc tacagctctg |
| 2701 | gcttggtggg aggatatggt ggctgagttt catgatcagg tgccttttga tggaatgtgg |
| 2761 | attgatatga atgagccttc taattttata agaggatctg aggatggatg tcctaataat |
| 2821 | gagctagaga atcctcctta tgtgcctgga gtagtgggag gaacactgca ggctgctaca |
| 2881 | atttgtgctt cttctcatca gtttctgtct acacattata atctgcataa tctgtatgga |
| 2941 | ctgacagagg ctattgcttc tcatagagct ctggtgaagg ctagaggaac aagacctttt |
| 3001 | gtgatttcta gatctacatt tgctggacat ggaagatatg ctggacattg gacaggagat |
| 3061 | gtatggtctt cttgggagca gctagcttct tctgtgcctg agattctgca gtttaatctg |
| 3121 | ctaggagtgc ctctggtggg agctgatgtg tgtggatttc tgggaaatac atctgaggag |
| 3181 | ctgtgtgtga gatggacaca gctgggagct ttttatcctt ttatgagaaa tcataattct |
| 3241 | ctgctgtctc tgcctcagga gccttattct ttttctgagc ctgctcagca ggctatgaga |
| 3301 | aaggctctga cactgagata tgctctgctg cctcatctgt atacactgtt tcatcaggct |
| 3361 | catgtggctg gagagacagt agctagacct ctgtttctgg agtttcctaa ggattcttct |
| 3421 | acatggacag ttgatcatca gctgctgtgg ggagaggctc tgctgattac acctgtgctg |
| 3481 | caggctggaa aggctgaggt gacaggatat tttcctctgg gaacatggta tgatctgcag |
| 3541 | acagtgccta tagaggctct gggatctctg cctcctcctc ctgctgctcc tagagagcct |
| 3601 | gctattcatt ctgagggaca gtgggtgaca ctgcctgctc ctctggatac aattaatgtg |
| 3661 | catctgagag ctggatatat tattcctctg cagggacctg gactgacaac aacagagtct |
| 3721 | agacagcagc ctatggctct ggctgtggct ctgacaaagg gaggagaggc tagaggagag |
| 3781 | ctgttttggg atgatggaga gtctctggag gtgctggaga gaggagctta tacacaggtg |
| 3841 | atttttctgg ctagaaataa tacaattgtg aatgagctgg tgagagtgac atctgaggga |
| 3901 | gctggactgc agctgcagaa ggtgacagtg ctgggagtgg ctacagctcc tcagcaggtg |
| 3961 | ctgtctaatg gagtgcctgt gtctaatttt acatattctc ctgatacaaa ggtgctggat |
| 4021 | atttgtgtgt ctctgctgat gggagagcag tttctggtgt cttggtgtta atgatttaaa |
| 4081 | tctcgagccg ggcggagtgt gttagtctct ccagagggag gctggttccc cagggaagca |
| 4141 | gagcctgtgt gcgggcagca gctgtgtgcg ggcctggggg ttgttaagtg caattatttt |
| 4201 | taataaaagg ggcatttgga aaaaaaaaaa aaaggtagca gtcgacagat gaattctgca |
| 4261 | gatctgtggc ttctagctgc ccgggtggca tccctgtgac ccctccccag tgcctctcct |
| 4321 | ggccctggaa gttgccactc cagtgcccac cagccttgtc ctaataaaat taagttgcat |
| 4381 | cattttgtct gactaggtgt ccttctataa tattatgggg tggagggggg tggtatggag |
| 4441 | caaggggcaa gttgggaaga caacctgtag ggcctgcggg gtctattggg aaccaagctg |
| 4501 | gagtgcagtg gcacaatctt ggctcactgc aatctccgcc tcctgggttc aagcgattct |
| 4561 | cctgcctcag cctcccgagt tgttgggatt ccaggcatgc atgaccaggc tcagctaatt |
| 4621 | tttgtttttt tggtagagac ggggtttcac catattggcc aggctggtct ccaactccta |
| 4681 | atctcaggtg atctacccac cttggcctcc caaattgctg ggattacagg cgtgaaccac |
| 4741 | tgctcccttc cctgtccttc tgattttaaa aaaaagagaa atgttctggc acctgcactt |
| 4801 | gcactgggga cagcctattt tgctagtttg ttttgtttcg ttttgttttg atggagagcg |
| 4861 | tatgttgttt aaacgcggcc gcgtagataa gtagcatggc gggttaatca ttaactacaa |
| 4921 | ggaaccccta gtgatggagt tggccactcc ctctctgcgc gctcgctcgc tcactgaggc |
| 4981 | cgggcgacca aaggtcgccc gacgcccggg ctttgcccgg gcggcctcag tgagcgagcg |
| 5041 | agcgcgcagt taattaaggc gccctaggcc gacccttaga ctctgtactc agttctataa |
| 5101 | acgagccatt ggatacgaga tccgtagatt gataagggac acggaatatc cccggacgca |
| 5161 | atagacaccg gtggacagct tggtatcctg agcacagtcg cgcgtccgaa tctagctcta |
| 5221 | ctttagaggc cccggattct gatggtcgta gaccgcagaa ccgattgggg ggatgagatc |
| 5281 | tactagttat cagcacacaa ttgcccatta tacgcgcgta taatggacta ttgtgtgctg |
| 5341 | atatagggat aacagggtaa ttctagagct agcatatgga tccatcgatt tgatgcggta |
| 5401 | ttttctcctt acgcatctgt gcggtatttc acaccgcata cgtcaaagca accatagtac |
| 5461 | gcgccctgta gcggcgcatt aagcgcggcg ggtgtggtgg ttacgcgcag cgtgaccgct |
| 5521 | acacttgcca gcgccctagc gcccgctcct ttcgctttct tcccttcctt tctcgccacg |
| 5581 | ttcgccggct ttccccgtca agctctaaat cgggggctcc ctttagggtt ccgatttagt |
| 5641 | gctttacggc acctcgaccc caaaaaactt gatttgggtg atggttcacg tagtgggcca |
| 5701 | tcgccctgat agacggtttt tcgccctttg acgttggagt ccacgttctt taatagtgga |
| 5761 | ctcttgttcc aaactggaac aacactcaac tctatctcgg gctattcttt tgatttataa |
| 5821 | gggattttgc cgatttcggt ctattggtta aaaaatgagc tgatttaaca aaaatttaac |
| 5881 | gcgaatttta acaaaatatt aacgtttaca attttatggt gcactctcag tacaatctgc |
| 5941 | tctgatgccg catagttaag ccagccccga cacccgccaa cacccgctga cgcgccctga |
| 6001 | cgggcttgtc tgctcccggc atccgcttac agacaagctg tgaccgtctc cgggagctgc |
| 6061 | atgtgtcaga ggttttcacc gtcatcaccg aaacgcgcga gacgaaaggg cctcgtgata |
| 6121 | cgcctatttt tataggttaa tgtcatgata ataatggttt cttagacgtc aggtggcact |
| 6181 | tttcggggaa atgtgcgcgg aacccctatt tgtttatttt tctaaataca ttcaaatatg |
| 6241 | tatccgctca tgagacaata accctgataa atgcttcaat aatattgaaa aaggaagagt |
| 6301 | atgagccata ttcaacggga aacgtcgagg ccgcgattaa attccaacat ggatgctgat |
| 6361 | ttatatgggt ataaatgggc tcgcgataat gtcgggcaat caggtgcgac aatctatcgc |
| 6421 | ttgtatggga agcccgatgc gccagagttg tttctgaaac atggcaaagg tagcgttgcc |
| 6481 | aatgatgtta cagatgagat ggtcagacta aactggctga cggaatttat gcctcttccg |
| 6541 | accatcaagc attttatccg tactcctgat gatgcatggt tactcaccac tgcgatcccc |
| 6601 | ggaaaaacag cattccaggt attagaagaa tatcctgatt caggtgaaaa tattgttgat |
| 6661 | gcgctggcag tgttcctgcg ccggttgcat tcgattcctg tttgtaattg tccttttaac |
| 6721 | agcgatcgcg tatttcgtct cgctcaggcg caatcacgaa tgaataacgg tttggttgat |
| 6781 | gcgagtgatt ttgatgacga gcgtaatggc tggcctgttg aacaagtctg gaaagaaatg |
| 6841 | cataaacttt tgccattctc accggattca gtcgtcactc atggtgattt ctcacttgat |
| 6901 | aaccttattt ttgacgaggg gaaattaata ggttgtattg atgttggacg agtcggaatc |
| 6961 | gcagaccgat accaggatct tgccatccta tggaactgcc tcggtgagtt ttctccttca |
| 7021 | ttacagaaac ggctttttca aaaatatggt attgataatc ctgatatgaa taaattgcag |
| 7081 | tttcatttga tgctcgatga gtttttctaa gcgtataatg gtctagagct agcatatgga |
| 7141 | tccatcgatt ccattatacg cctgtcagac caagtttact catatatact ttagattgat |
| 7201 | ttaaaacttc atttttaatt taaaaggatc taggtgaaga tcctttttga taatctcatg |
| 7261 | accaaaatcc cttaacgtga gttttcgttc cactgagcgt cagaccccgt agaaaagatc |
| 7321 | aaaggatctt cttgagatcc tttttttctg cgcgtaatct gctgcttgca aacaaaaaaa |
| 7381 | ccaccgctac cagcggtggt ttgtttgccg gatcaagagc taccaactct ttttccgaag |
| 7441 | gtaactggct tcagcagagc gcagatacca aatactgttc ttctagtgta gccgtagtta |
| 7501 | ggccaccact tcaagaactc tgtagcaccg cctacatacc tcgctctgct aatcctgtta |
| 7561 | ccagtggctg ctgccagtgg cgataagtcg tgtcttaccg ggttggactc aagacgatag |
| 7621 | ttaccggata aggcgcagcg gtcgggctga acggggggtt cgtgcacaca gcccagcttg |
| 7681 | gagcgaacga cctacaccga actgagatac ctacagcgtg agctatgaga aagcgccacg |
| 7741 | cttcccgaag ggagaaaggc ggacaggtat ccggtaagcg gcagggtcgg aacaggagag |
| 7801 | cgcacgaggg agcttccagg gggaaacgcc tggtatcttt atagtcctgt cgggtttcgc |
| 7861 | cacctctgac ttgagcgtcg atttttgtga tgctcgtcag gggggcggag cctatggaaa |
| 7921 | aacgccagca acgcggcctt tttacggttc ctggcctttt gctggccttt tgctcacatg |
| 7981 | t |

| pP087_seq100-IL2wt_11-56 deletion (SEQ ID NO: 492) | |
|---|---|
| (SEQ ID NO: 492) | |
| 1 | tctagagcta gcatatggat ccatcgattt agggataaca gggtaattat cagcacacaa |
| 61 | ttgcccatta tacgcgcgta taatggacta ttgtgtgctg atatctgtac acttaagggc |
| 121 | tagatcttag cttacgtcac tagagggtcc acgtttagtt tttaagatcc attgatctcc |
| 181 | taaacgctgc aagattcgca acctggtata cttagcctag gcgctaggtc ctagtgcagc |
| 241 | gggacttttt ttctaaagtc gttgagagga ggagtcgtca gaccagatag ctttgatgtc |
| 301 | ctgatcggaa ggatcgttgg cccccctgca ggcagctgtt aattaactgc gcgctcgctc |
| 361 | gctcactgag gccgcccggg caaagcccgg gcgtcgggcg acctttggtc gcccggcctc |
| 421 | agtgagcgag cgagcgcgca gagagggagt ggccaactcc atcactaggg gttccttgta |
| 481 | gttaatgatt aacccgccat gctacttatc tacggcgcgc cacgcgttct aggagttaat |
| 541 | ttttaaaaag cagtcaaaag tccaagtgcc cttgcgagca tttactctct ctgtttgctc |
| 601 | tggttaataa tctcaggagc acaaacattc cttactagtt ctaggagtta atttttaaaa |
| 661 | agcagtcaaa agtccaagtg cccttgcgag catttactct ctctgtttgc tctggttaat |
| 721 | aatctcagga gcacaaacat tccttactag ttctagagcg gccgccagtg tgctggaatt |
| 781 | cggctttttt agggctggaa gctacctttg acatcatttc ctctgcgaat gcatgtataa |
| 841 | tttctacaga acctattaga aaggatcacc cagcctctgc ttttgtacaa ctttccctta |
| 901 | aaaaactgcc aatcccactg ctgtttggcc caatagtgag aactttttcc tgctgcctct |
| 961 | tggtgctttt gcctatggcc cctattctgc ctgctgaaga cactcttgcc agcatggact |
| 1021 | taaacccctc cagctctgac aatcctcttt ctcttttgtt ttacatgaag ggtctggcag |
| 1081 | ccaaagcaat cactcaaagt tcaaacctta tcattttttg ctttgttcct cttggccttg |
| 1141 | gttttgtaca tcagctttga aaataccatc ccagggttaa tgctggggtt aatttataac |
| 1201 | tgagagtgct ctagttctgc aatacaggac atgctataaa aatggaaaga tgttgctttc |
| 1261 | tgagagatca ggtggattct tgggcatttg cttaagcttg gtaccgccac catgggggtg |
| 1321 | aggcaccctc cctgttctca ctacagaatg cagctgctgt cctgcattgc actgtcactg |
| 1381 | gcactggtta ccaactcaca gcagggggcc agcaggccag gccccaggga tgcccaggcc |
| 1441 | caccctggca gacccagggc tgtgcccacc cagtgtgatg tgcctcccaa cagcagattt |
| 1501 | gactgtgccc ctgataaggc cattactcag gaacagtgtg aggccagggg ctgctgctat |
| 1561 | atccctgcca agcagggcct gcagggggcc cagatggggc agccctggtg cttcttcccc |
| 1621 | cccagctacc cctcttataa gctggagaat ctgagcagct ctgaaatggg ctacactgcc |
| 1681 | actctgacca ggactacccc caccttcttc cccaaggata ttctgactct gaggctggat |
| 1741 | gtgatgatgg agactgagaa caggctgcac ttcaccatca aggaccctgc caacaggagg |
| 1801 | tatgaggtgc ccctggaaac tcccagggtg cactctaggg cccccagccc cctgtattct |
| 1861 | gtggagttct ctgaggagcc ttttggggtc attgtccaca ggcagctgga tggcagggtg |
| 1921 | ctgctgaata ctactgtggc ccctctgttc tttgctgacc agttcctgca gctgagcacc |
| 1981 | agcctgcctt ctcagtacat tactggcctg gctgagcatc tgagccccct gatgctgagc |
| 2041 | acctcttgga ccagaatcac cctgtggaac agggacctgg ctcccactcc tggggccaac |
| 2101 | ctgtatggca gccacccctt ctacctggcc ctggaggatg ggggctctgc ccatggggtg |
| 2161 | ttcctgctga acagcaatgc catggatgtg gtgctgcagc cctctcctgc cctgtcttgg |
| 2221 | agatctactg ggggcatcct ggatgtgtat atcttcctgg ggcctgagcc caagtctgtg |
| 2281 | gtgcagcagt acctggatgt ggtgggctac cccttcatgc ccccctactg gggcctgggc |
| 2341 | ttccacctgt gcaggtgggg ctactcttct actgctatca ccaggcaggt ggtggagaac |
| 2401 | atgaccaggg ctcacttccc tctggatgtg cagtggaatg acctggacta catggactct |
| 2461 | aggagagact tcacttttaa taaggatggg ttcagggact ttcctgccat ggtgcaggag |
| 2521 | ctgcatcagg ggggcaggag atatatgatg attgtggacc ctgctatttc tagctctggc |
| 2581 | cctgctggca gctataggcc ctatgatgag gggctgagga ggggggtgtt catcactaat |
| 2641 | gagactggcc agcccctgat tggcaaggtg tggcctggct ctactgcctt ccctgatttc |
| 2701 | accaacccca ctgccctggc ctggtgggag gatatggtgg ctgagtttca tgaccaggtg |
| 2761 | ccctttgatg gcatgtggat tgacatgaat gagcccagca actttatcag gggctctgaa |
| 2821 | gatggctgcc ccaacaatga gctggagaac cccccctatg tgcctggggt ggtggggggc |
| 2881 | accctgcagg ctgccaccat ctgtgccagc agccaccagt tcctgagcac ccactataac |
| 2941 | ctgcacaacc tgtatggcct gactgaggcc attgcctctc acagggccct ggtgaaggct |
| 3001 | agggggacta ggccctttgt gatcagcagg tctacttttg ctggccatgg caggtatgct |
| 3061 | gggcactgga ctggggatgt gtggtctagc tgggagcagc tggccagctc tgtgcctgag |
| 3121 | atcctgcagt ttaatctgct gggggtgccc ctggtggggg ctgatgtgtg tggcttcctg |
| 3181 | ggcaatacct ctgaggagct gtgtgtgagg tggactcagc tgggggcttt ctaccccttc |
| 3241 | atgagaaacc acaactctct gctgagcctg ccccaggagc cctattcttt ttctgagcct |
| 3301 | gcccagcagg ctatgaggaa ggccctgact ctgaggtatg ccctgctgcc ccacctgtat |
| 3361 | accctgttcc atcaggccca tgtggctggg gagactgtgg ccagacctct gttcctggag |
| 3421 | ttccccaagg atagctctac ttggactgtg gaccaccagc tgctgtgggg ggaggctctg |
| 3481 | ctgatcaccc ctgtgctgca ggctgggaag gctgaggtga ctggctattt ccccctgggc |
| 3541 | acctggtatg atctgcagac tgtgcccatt gaggccctgg gctctctgcc ccctccccct |
| 3601 | gctgccccca gggagcctgc catccactct gagggccagt gggtgaccct gcctgcccct |
| 3661 | ctggacacta tcaatgtgca cctgagggct ggctacatca tccccctgca gggccctggc |
| 3721 | ctgactacca ctgagtctag gcagcagccc atggccctgg ctgtggctct gaccaagggg |
| 3781 | ggggaggcca ggggggagct gttctgggat gatggggagt ctctggaggt gctggagagg |
| 3841 | ggggcctaca cccaggtgat cttcctggct aggaataaca ccattgtcaa tgagctggtg |
| 3901 | agggtgacct ctgagggggc tggcctgcag ctgcagaagg tgactgtgct gggggtggct |
| 3961 | actgcccccc agcaggtgct gagcaatggg gtgcctgtga gcaacttcac ctatagccct |
| 4021 | gacaccaagg tgctggacat ctgtgtgagc ctgctgatgg gggagcagtt cctggtgagc |
| 4081 | tggtgctaat ttaaatctcg agccgggcgg agtgtgttag tctctccaga gggaggctgg |
| 4141 | ttccccaggg aagcagagcc tgtgtgcggg cagcagctgt gtgcgggcct gggggttgtt |
| 4201 | aagtgcaatt atttttaata aaaggggcat ttggaaaaaa aaaaaaaagg tagcagtcga |
| 4261 | cagatgaatt ctgcagatct gtggcttcta gctgcccggg tggcatccct gtgacccctc |
| 4321 | cccagtgcct ctcctggccc tggaagttgc cactccagtg cccaccagcc ttgtcctaat |
| 4381 | aaaattaagt tgcatcattt tgtctgacta ggtgtccttc tataatatta tggggtggag |
| 4441 | gggggtggta tggagcaagg ggcaagttgg gaagacaacc tgtagggcct gcggggtcta |
| 4501 | ttgggaacca agctggagtg cagtggcaca atcttggctc actgcaatct ccgcctcctg |
| 4561 | ggttcaagcg attctcctgc ctcagcctcc cgagttgttg ggattccagg catgcatgac |
| 4621 | caggctcagc taatttttgt ttttttggta gagacggggt ttcaccatat tggccaggct |
| 4681 | ggtctccaac tcctaatctc aggtgatcta cccaccttgg cctcccaaat tgctgggatt |
| 4741 | acaggcgtga accactgctc ccttccctgt ccttctgatt ttaaaaaaaa gagaaatgtt |
| 4801 | ctggcacctg cacttgcact ggggacagcc tattttgcta gtttgttttg tttcgttttg |
| 4861 | ttttgatgga gagcgtatgt tgtttaaacg cggccgcgta gataagtagc atggcgggtt |
| 4921 | aatcattaac tacaaggaac ccctagtgat ggagttggcc actccctctc tgcgcgctcg |
| 4981 | ctcgctcact gaggccgggc gaccaaaggt cgcccgacgc ccgggctttg cccgggcggc |
| 5041 | ctcagtgagc gagcgagcgc gcagttaatt aaggcgccct aggccgaccc ttagactctg |
| 5101 | tactcagttc tataaacgag ccattggata cgagatccgt agattgataa gggacacgga |
| 5161 | atatccccgg acgcaataga caccggtgga cagcttggta tcctgagcac agtcgcgcgt |
| 5221 | ccgaatctag ctctacttta gaggccccgg attctgatgg tcgtagaccg cagaaccgat |
| 5281 | tggggggatg agatctacta gttatcagca cacaattgcc cattatacgc gcgtataatg |
| 5341 | gactattgtg tgctgatata gggataacag ggtaattcta gagctagcat atggatccat |
| 5401 | cgatttgatg cggtattttc tccttacgca tctgtgcggt atttcacacc gcatacgtca |
| 5461 | aagcaaccat agtacgcgcc ctgtagcggc gcattaagcg cggcgggtgt ggtggttacg |
| 5521 | cgcagcgtga ccgctacact tgccagcgcc ctagcgcccg ctcctttcgc tttcttccct |
| 5581 | tcctttctcg ccacgttcgc cggctttccc cgtcaagctc taaatcgggg gctcccttta |
| 5641 | gggttccgat ttagtgcttt acggcacctc gaccccaaaa aacttgattt gggtgatggt |
| 5701 | tcacgtagtg ggccatcgcc ctgatagacg gtttttcgcc ctttgacgtt ggagtccacg |
| 5761 | ttctttaata gtggactctt gttccaaact ggaacaacac tcaactctat ctcgggctat |
| 5821 | tcttttgatt tataagggat tttgccgatt tcggtctatt ggttaaaaaa tgagctgatt |
| 5881 | taacaaaaat ttaacgcgaa ttttaacaaa atattaacgt ttacaatttt atggtgcact |
| 5941 | ctcagtacaa tctgctctga tgccgcatag ttaagccagc cccgacaccc gccaacaccc |
| 6001 | gctgacgcgc cctgacgggc ttgtctgctc ccggcatccg cttacagaca agctgtgacc |
| 6061 | gtctccggga gctgcatgtg tcagaggttt tcaccgtcat caccgaaacg cgcgagacga |
| 6121 | aagggcctcg tgatacgcct atttttatag gttaatgtca tgataataat ggtttcttag |
| 6181 | acgtcaggtg gcacttttcg gggaaatgtg cgcggaaccc ctatttgttt atttttctaa |
| 6241 | atacattcaa atatgtatcc gctcatgaga caataaccct gataaatgct tcaataatat |
| 6301 | tgaaaaagga agagtatgag ccatattcaa cgggaaacgt cgaggccgcg attaaattcc |
| 6361 | aacatggatg ctgatttata tgggtataaa tgggctcgcg ataatgtcgg gcaatcaggt |
| 6421 | gcgacaatct atcgcttgta tgggaagccc gatgcgccag agttgtttct gaaacatggc |
| 6481 | aaaggtagcg ttgccaatga tgttacagat gagatggtca gactaaactg gctgacggaa |
| 6541 | tttatgcctc ttccgaccat caagcatttt atccgtactc ctgatgatgc atggttactc |
| 6601 | accactgcga tccccggaaa aacagcattc caggtattag aagaatatcc tgattcaggt |
| 6661 | gaaaatattg ttgatgcgct ggcagtgttc ctgcgccggt tgcattcgat tcctgtttgt |
| 6721 | aattgtcctt ttaacagcga tcgcgtattt cgtctcgctc aggcgcaatc acgaatgaat |
| 6781 | aacggtttgg ttgatgcgag tgattttgat gacgagcgta atggctggcc tgttgaacaa |
| 6841 | gtctggaaag aaatgcataa acttttgcca ttctcaccgg attcagtcgt cactcatggt |
| 6901 | gatttctcac ttgataacct tatttttgac gaggggaaat taataggttg tattgatgtt |
| 6961 | ggacgagtcg gaatcgcaga ccgataccag gatcttgcca tcctatggaa ctgcctcggt |
| 7021 | gagttttctc cttcattaca gaaacggctt tttcaaaaat atggtattga taatcctgat |
| 7081 | atgaataaat tgcagtttca tttgatgctc gatgagtttt tctaagcgta taatggtcta |
| 7141 | gagctagcat atggatccat cgattccatt atacgcctgt cagaccaagt ttactcatat |
| 7201 | atactttaga ttgatttaaa acttcatttt taatttaaaa ggatctaggt gaagatcctt |
| 7261 | tttgataatc tcatgaccaa aatcccttaa cgtgagtttt cgttccactg agcgtcagac |
| 7321 | cccgtagaaa agatcaaagg atcttcttga gatccttttt ttctgcgcgt aatctgctgc |
| 7381 | ttgcaaacaa aaaaaccacc gctaccagcg gtggtttgtt tgccggatca agagctacca |
| 7441 | actctttttc cgaaggtaac tggcttcagc agagcgcaga taccaaatac tgttcttcta |
| 7501 | gtgtagccgt agttaggcca ccacttcaag aactctgtag caccgcctac atacctcgct |
| 7561 | ctgctaatcc tgttaccagt ggctgctgcc agtggcgata agtcgtgtct taccgggttg |
| 7621 | gactcaagac gatagttacc ggataaggcg cagcggtcgg gctgaacggg gggttcgtgc |
| 7681 | acacagccca gcttggagcg aacgacctac accgaactga gatacctaca gcgtgagcta |
| 7741 | tgagaaagcg ccacgcttcc cgaagggaga aaggcggaca ggtatccggt aagcggcagg |
| 7801 | gtcggaacag gagagcgcac gagggagctt ccagggggaa acgcctggta tctttatagt |
| 7861 | cctgtcgggt ttcgccacct ctgacttgag cgtcgatttt tgtgatgctc gtcagggggg |
| 7921 | cggagcctat ggaaaaacgc cagcaacgcg gcctttttac ggttcctggc cttttgctgg |
| 7981 | ccttttgctc acatgt |

| pP088_seq100-201Ig_11-56 deletion (SEQ ID NO: 493) | |
|---|---|
| (SEQ ID NO: 493) | |
| 1 | tctagagcta gcatatggat ccatcgattt agggataaca gggtaattat cagcacacaa |
| 61 | ttgcccatta tacgcgcgta taatggacta ttgtgtgctg atatctgtac acttaagggc |
| 121 | tagatcttag cttacgtcac tagagggtcc acgtttagtt tttaagatcc attgatctcc |
| 181 | taaacgctgc aagattcgca acctggtata cttagcctag gcgctaggtc ctagtgcagc |
| 241 | gggacttttt ttctaaagtc gttgagagga ggagtcgtca gaccagatag ctttgatgtc |
| 301 | ctgatcggaa ggatcgttgg cccccctgca ggcagctgtt aattaactgc gcgctcgctc |
| 361 | gctcactgag gccgcccggg caaagcccgg gcgtcgggcg acctttggtc gcccggcctc |
| 421 | agtgagcgag cgagcgcgca gagagggagt ggccaactcc atcactaggg gttccttgta |
| 481 | gttaatgatt aacccgccat gctacttatc tacggcgcgc cacgcgttct aggagttaat |
| 541 | ttttaaaaag cagtcaaaag tccaagtgcc cttgcgagca tttactctct ctgtttgctc |
| 601 | tggttaataa tctcaggagc acaaacattc cttactagtt ctaggagtta atttttaaaa |
| 661 | agcagtcaaa agtccaagtg cccttgcgag catttactct ctctgtttgc tctggttaat |
| 721 | aatctcagga gcacaaacat tccttactag ttctagagcg gccgccagtg tgctggaatt |
| 781 | cggctttttt agggctggaa gctacctttg acatcatttc ctctgcgaat gcatgtataa |
| 841 | tttctacaga acctattaga aaggatcacc cagcctctgc ttttgtacaa ctttccctta |
| 901 | aaaaactgcc aatcccactg ctgtttggcc caatagtgag aactttttcc tgctgcctct |
| 961 | tggtgctttt gcctatggcc cctattctgc ctgctgaaga cactcttgcc agcatggact |
| 1021 | taaacccctc cagctctgac aatcctcttt ctcttttgtt ttacatgaag ggtctggcag |
| 1081 | ccaaagcaat cactcaaagt tcaaacctta tcattttttg ctttgttcct cttggccttg |
| 1141 | gttttgtaca tcagctttga aaataccatc ccagggttaa tgctggggtt aatttataac |
| 1201 | tgagagtgct ctagttctgc aatacaggac atgctataaa aatggaaaga tgttgctttc |
| 1261 | tgagagatca ggtggattct tgggcatttg cttaagcttg gtaccgccac catgggggtg |
| 1321 | aggcaccctc cctgttctca tgagtttggg ctgagctggg tctttctggt ggccctgctg |
| 1381 | aagggagtcc agtgtgagca gcagggggcc agcaggccag gccccaggga tgcccaggcc |
| 1441 | caccctggca gacccagggc tgtgcccacc cagtgtgatg tgcctcccaa cagcagattt |
| 1501 | gactgtgccc ctgataaggc cattactcag gaacagtgtg aggccagggg ctgctgctat |
| 1561 | atccctgcca agcagggcct gcagggggcc cagatggggc agccctggtg cttcttcccc |
| 1621 | cccagctacc cctcttataa gctggagaat ctgagcagct ctgaaatggg ctacactgcc |
| 1681 | actctgacca ggactacccc caccttcttc cccaaggata ttctgactct gaggctggat |
| 1741 | gtgatgatgg agactgagaa caggctgcac ttcaccatca aggaccctgc caacaggagg |
| 1801 | tatgaggtgc ccctggaaac tcccagggtg cactctaggg cccccagccc cctgtattct |
| 1861 | gtggagttct ctgaggagcc ttttggggtc attgtccaca ggcagctgga tggcagggtg |
| 1921 | ctgctgaata ctactgtggc ccctctgttc tttgctgacc agttcctgca gctgagcacc |
| 1981 | agcctgcctt ctcagtacat tactggcctg gctgagcatc tgagccccct gatgctgagc |
| 2041 | acctcttgga ccagaatcac cctgtggaac agggacctgg ctcccactcc tggggccaac |
| 2101 | ctgtatggca gccacccctt ctacctggcc ctggaggatg ggggctctgc ccatggggtg |
| 2161 | ttcctgctga acagcaatgc catggatgtg gtgctgcagc cctctcctgc cctgtcttgg |
| 2221 | agatctactg ggggcatcct ggatgtgtat atcttcctgg ggcctgagcc caagtctgtg |
| 2281 | gtgcagcagt acctggatgt ggtgggctac cccttcatgc ccccctactg gggcctgggc |
| 2341 | ttccacctgt gcaggtgggg ctactcttct actgctatca ccaggcaggt ggtggagaac |
| 2401 | atgaccaggg ctcacttccc tctggatgtg cagtggaatg acctggacta catggactct |
| 2461 | aggagagact tcacttttaa taaggatggg ttcagggact ttcctgccat ggtgcaggag |
| 2521 | ctgcatcagg ggggcaggag atatatgatg attgtggacc ctgctatttc tagctctggc |
| 2581 | cctgctggca gctataggcc ctatgatgag gggctgagga ggggggtgtt catcactaat |
| 2641 | gagactggcc agcccctgat tggcaaggtg tggcctggct ctactgcctt ccctgatttc |
| 2701 | accaacccca ctgccctggc ctggtgggag gatatggtgg ctgagtttca tgaccaggtg |
| 2761 | ccctttgatg gcatgtggat tgacatgaat gagcccagca actttatcag gggctctgaa |
| 2821 | gatggctgcc ccaacaatga gctggagaac cccccctatg tgcctggggt ggtggggggc |
| 2881 | accctgcagg ctgccaccat ctgtgccagc agccaccagt tcctgagcac ccactataac |
| 2941 | ctgcacaacc tgtatggcct gactgaggcc attgcctctc acagggccct ggtgaaggct |
| 3001 | agggggacta ggccctttgt gatcagcagg tctacttttg ctggccatgg caggtatgct |
| 3061 | gggcactgga ctggggatgt gtggtctagc tgggagcagc tggccagctc tgtgcctgag |
| 3121 | atcctgcagt ttaatctgct gggggtgccc ctggtggggg ctgatgtgtg tggcttcctg |
| 3181 | ggcaatacct ctgaggagct gtgtgtgagg tggactcagc tgggggcttt ctaccccttc |
| 3241 | atgagaaacc acaactctct gctgagcctg ccccaggagc cctattcttt ttctgagcct |
| 3301 | gcccagcagg ctatgaggaa ggccctgact ctgaggtatg ccctgctgcc ccacctgtat |
| 3361 | accctgttcc atcaggccca tgtggctggg gagactgtgg ccagacctct gttcctggag |
| 3421 | ttccccaagg atagctctac ttggactgtg gaccaccagc tgctgtgggg ggaggctctg |
| 3481 | ctgatcaccc ctgtgctgca ggctgggaag gctgaggtga ctggctattt ccccctgggc |
| 3541 | acctggtatg atctgcagac tgtgcccatt gaggccctgg gctctctgcc ccctccccct |
| 3601 | gctgccccca gggagcctgc catccactct gagggccagt gggtgaccct gcctgcccct |
| 3661 | ctggacacta tcaatgtgca cctgagggct ggctacatca tccccctgca gggccctggc |
| 3721 | ctgactacca ctgagtctag gcagcagccc atggccctgg ctgtggctct gaccaagggg |
| 3781 | ggggaggcca ggggggagct gttctgggat gatggggagt ctctggaggt gctggagagg |
| 3841 | ggggcctaca cccaggtgat cttcctggct aggaataaca ccattgtcaa tgagctggtg |
| 3901 | agggtgacct ctgagggggc tggcctgcag ctgcagaagg tgactgtgct gggggtggct |
| 3961 | actgcccccc agcaggtgct gagcaatggg gtgcctgtga gcaacttcac ctatagccct |
| 4021 | gacaccaagg tgctggacat ctgtgtgagc ctgctgatgg gggagcagtt cctggtgagc |
| 4081 | tggtgctaat ttaaatctcg agccgggcgg agtgtgttag tctctccaga gggaggctgg |
| 4141 | ttccccaggg aagcagagcc tgtgtgcggg cagcagctgt gtgcgggcct gggggttgtt |
| 4201 | aagtgcaatt atttttaata aaaggggcat ttggaaaaaa aaaaaaaagg tagcagtcga |
| 4261 | cagatgaatt ctgcagatct gtggcttcta gctgcccggg tggcatccct gtgacccctc |
| 4321 | cccagtgcct ctcctggccc tggaagttgc cactccagtg cccaccagcc ttgtcctaat |
| 4381 | aaaattaagt tgcatcattt tgtctgacta ggtgtccttc tataatatta tgggtgggag |
| 4441 | gggggtggta tggagcaagg ggcaagttgg gaagacaacc tgtagggcct gcggggtcta |
| 4501 | ttgggaacca agctggagtg cagtggcaca atcttggctc actgcaatct ccgcctcctg |
| 4561 | ggttcaagcg attctcctgc ctcagcctcc cgagttgttg ggattccagg catgcatgac |
| 4621 | caggctcagc taatttttgt ttttttggta gagacggggt ttcaccatat tggccaggct |
| 4681 | ggtctccaac tcctaatctc aggtgatcta cccaccttgg cctcccaaat tgctgggatt |
| 4741 | acaggcgtga accactgctc ccttccctgt ccttctgatt ttaaaaaaaa gagaaatgtt |
| 4801 | ctggcacctg cacttgcact ggggacagcc tattttgcta gtttgttttg tttcgttttg |
| 4861 | ttttgatgga gagcgtatgt tgtttaaacg cggccgcgta gataagtagc atggcgggtt |
| 4921 | aatcattaac tacaaggaac ccctagtgat ggagttggcc actccctctc tgcgcgctcg |
| 4981 | ctcgctcact gaggccgggc gaccaaaggt cgcccgacgc ccgggctttg cccgggcggc |
| 5041 | ctcagtgagc gagcgagcgc gcagttaatt aaggcgccct aggccgaccc ttagactctg |
| 5101 | tactcagttc tataaacgag ccattggata cgagatccgt agattgataa gggacacgga |
| 5161 | atatccccgg acgcaataga caccggtgga cagcttggta tcctgagcac agtcgcgcgt |
| 5221 | ccgaatctag ctctacttta gaggccccgg attctgatgg tcgtagaccg cagaaccgat |
| 5281 | tggggggatg agatctacta gttatcagca cacaattgcc cattatacgc gcgtataatg |
| 5341 | gactattgtg tgctgatata gggataacag ggtaattcta gagctagcat atggatccat |
| 5401 | cgatttgatg cggtattttc tccttacgca tctgtgcggt atttcacacc gcatacgtca |
| 5461 | aagcaaccat agtacgcgcc ctgtagcggc gcattaagcg cggcgggtgt ggtggttacg |
| 5521 | cgcagcgtga ccgctacact tgccagcgcc ctagcgcccg ctcctttcgc tttcttccct |
| 5581 | tcctttctcg ccacgttcgc cggctttccc cgtcaagctc taaatcgggg gctcccttta |
| 5641 | gggttccgat ttagtgcttt acggcacctc gaccccaaaa aacttgattt gggtgatggt |
| 5701 | tcacgtagtg ggccatcgcc ctgatagacg gtttttcgcc ctttgacgtt ggagtccacg |
| 5761 | ttctttaata gtggactctt gttccaaact ggaacaacac tcaactctat ctcgggctat |
| 5821 | tcttttgatt tataagggat tttgccgatt tcggtctatt ggttaaaaaa tgagctgatt |
| 5881 | taacaaaaat ttaacgcgaa ttttaacaaa atattaacgt ttacaatttt atggtgcact |
| 5941 | ctcagtacaa tctgctctga tgccgcatag ttaagccagc cccgacaccc gccaacaccc |
| 6001 | gctgacgcgc cctgacgggc ttgtctgctc ccggcatccg cttacagaca agctgtgacc |
| 6061 | gtctccggga gctgcatgtg tcagaggttt tcaccgtcat caccgaaacg cgcgagacga |
| 6121 | aagggcctcg tgatacgcct atttttatag gttaatgtca tgataataat ggtttcttag |
| 6181 | acgtcaggtg gcacttttcg gggaaatgtg cgcggaaccc ctatttgttt atttttctaa |
| 6241 | atacattcaa atatgtatcc gctcatgaga caataaccct gataaatgct tcaataatat |
| 6301 | tgaaaaagga agagtatgag ccatattcaa cgggaaacgt cgaggccgcg attaaattcc |
| 6361 | aacatggatg ctgatttata tgggtataaa tgggctcgcg ataatgtcgg gcaatcaggt |
| 6421 | gcgacaatct atcgcttgta tgggaagccc gatgcgccag agttgtttct gaaacatggc |
| 6481 | aaaggtagcg ttgccaatga tgttacagat gagatggtca gactaaactg gctgacggaa |
| 6541 | tttatgcctc ttccgaccat caagcatttt atccgtactc ctgatgatgc atggttactc |
| 6601 | accactgcga tccccggaaa aacagcattc caggtattag aagaatatcc tgattcaggt |
| 6661 | gaaaatattg ttgatgcgct ggcagtgttc ctgcgccggt tgcattcgat tcctgtttgt |
| 6721 | aattgtcctt ttaacagcga tcgcgtattt cgtctcgctc aggcgcaatc acgaatgaat |
| 6781 | aacggtttgg ttgatgcgag tgattttgat gacgagcgta atggctggcc tgttgaacaa |
| 6841 | gtctggaaag aaatgcataa acttttgcca ttctcaccgg attcagtcgt cactcatggt |
| 6901 | gatttctcac ttgataacct tatttttgac gaggggaaat taataggttg tattgatgtt |
| 6961 | ggacgagtcg gaatcgcaga ccgataccag gatcttgcca tcctatggaa ctgcctcggt |
| 7021 | gagttttctc cttcattaca gaaacggctt tttcaaaaat atggtattga taatcctgat |
| 7081 | atgaataaat tgcagtttca tttgatgctc gatgagtttt tctaagcgta taatggtcta |
| 7141 | gagctagcat atggatccat cgattccatt atacgcctgt cagaccaagt ttactcatat |
| 7201 | atactttaga ttgatttaaa acttcatttt taatttaaaa ggatctaggt gaagatcctt |
| 7261 | tttgataatc tcatgaccaa aatcccttaa cgtgagtttt cgttccactg agcgtcagac |
| 7321 | cccgtagaaa agatcaaagg atcttcttga gatccttttt ttctgcgcgt aatctgctgc |
| 7381 | ttgcaaacaa aaaaaccacc gctaccagcg gtggtttgtt tgccggatca agagctacca |
| 7441 | actctttttc cgaaggtaac tggcttcagc agagcgcaga taccaaatac tgttcttcta |
| 7501 | gtgtagccgt agttaggcca ccacttcaag aactctgtag caccgcctac atacctcgct |
| 7561 | ctgctaatcc tgttaccagt ggctgctgcc agtggcgata agtcgtgtct taccgggttg |
| 7621 | gactcaagac gatagttacc ggataaggcg cagcggtcgg gctgaacggg gggttcgtgc |
| 7681 | acacagccca gcttggagcg aacgacctac accgaactga gatacctaca gcgtgagcta |
| 7741 | tgagaaagcg ccacgcttcc cgaagggaga aaggcggaca ggtatccggt aagcggcagg |
| 7801 | gtcggaacag gagagcgcac gagggagctt ccagggggaa acgcctggta tctttatagt |
| 7861 | cctgtcgggt ttcgccacct ctgacttgag cgtcgatttt tgtgatgctc gtcagggggg |
| 7921 | cggagcctat ggaaaaacgc cagcaacgcg gcctttttac ggttcctggc cttttgctgg |
| 7981 | ccttttgctc acatgt |

| pP089_seq3-IL2wt_11-56 deletion (SEQ ID NO: 494) | |
|---|---|
| (SEQ ID NO: 494) | |
| 1 | tctagagcta gcatatggat ccatcgattt agggataaca gggtaattat cagcacacaa |
| 61 | ttgcccatta tacgcgcgta taatggacta ttgtgtgctg atatctgtac acttaagggc |
| 121 | tagatcttag cttacgtcac tagagggtcc acgtttagtt tttaagatcc attgatctcc |
| 181 | taaacgctgc aagattcgca acctggtata cttagcctag gcgctaggtc ctagtgcagc |
| 241 | gggacttttt ttctaaagtc gttgagagga ggagtcgtca gaccagatag ctttgatgtc |
| 301 | ctgatcggaa ggatcgttgg cccccctgca ggcagctgtt aattaactgc gcgctcgctc |
| 361 | gctcactgag gccgcccggg caaagcccgg gcgtcgggcg acctttggtc gcccggcctc |
| 421 | agtgagcgag cgagcgcgca gagagggagt ggccaactcc atcactaggg gttccttgta |
| 481 | gttaatgatt aacccgccat gctacttatc tacggcgcgc cacgcgttct aggagttaat |
| 541 | ttttaaaaag cagtcaaaag tccaagtgcc cttgcgagca tttactctct ctgtttgctc |
| 601 | tggttaataa tctcaggagc acaaacattc cttactagtt ctaggagtta atttttaaaa |
| 661 | agcagtcaaa agtccaagtg cccttgcgag catttactct ctctgtttgc tctggttaat |
| 721 | aatctcagga gcacaaacat tccttactag ttctagagcg gccgccagtg tgctggaatt |
| 781 | cggctttttt agggctggaa gctacctttg acatcatttc ctctgcgaat gcatgtataa |
| 841 | tttctacaga acctattaga aaggatcacc cagcctctgc ttttgtacaa ctttccctta |
| 901 | aaaaactgcc aatcccactg ctgtttggcc caatagtgag aactttttcc tgctgcctct |
| 961 | tggtgctttt gcctatggcc cctattctgc ctgctgaaga cactcttgcc agcatggact |
| 1021 | taaacccctc cagctctgac aatcctcttt ctcttttgtt ttacatgaag ggtctggcag |
| 1081 | ccaaagcaat cactcaaagt tcaaacctta tcattttttg ctttgttcct cttggccttg |
| 1141 | gttttgtaca tcagctttga aaataccatc ccagggttaa tgctggggtt aatttataac |
| 1201 | tgagagtgct ctagttctgc aatacaggac atgctataaa aatggaaaga tgttgctttc |
| 1261 | tgagagatca ggtggattct tgggcatttg cttaagcttg gtaccgccac catgggggtg |
| 1321 | aggcaccctc cctgttctca ctacagaatg cagctgctgt cctgcattgc actgtcactg |
| 1381 | gcactggtta ccaactcaca gcagggagct tctagacctg gacctagaga tgctcaggct |
| 1441 | catcctggaa gacctagagc tgtgcctaca cagtgtgatg tgcctcctaa ttctagattt |
| 1501 | gattgtgctc ctgataaggc tataacacag gagcagtgtg aggctagagg atgttgttat |
| 1561 | attcctgcta agcagggact gcagggagct cagatgggac agccttggtg tttttttcct |
| 1621 | ccttcttatc cttcttataa gctggagaat ctgtcttctt ctgagatggg atatacagct |
| 1681 | acactgacaa gaacaacacc tacatttttt cctaaggata ttctgacact gagactggat |
| 1741 | gtgatgatgg agacagagaa tagactgcat tttacaatta aggatcctgc taatagaaga |
| 1801 | tatgaggtgc ctctagagac acctagagtg cattctagag ctccttctcc tctgtattct |
| 1861 | gtggagtttt ctgaggagcc ttttggagtg attgtgcata gacagctgga tggaagagtg |
| 1921 | ctgctgaata caacagtggc tcctctgttt tttgctgatc agtttctgca gctgtctaca |
| 1981 | tctctgcctt ctcagtatat tacaggactg gctgagcatc tgtctcctct gatgctgtct |
| 2041 | acatcttgga caagaattac actgtggaat agagatctgg ctcctacacc tggagctaat |
| 2101 | ctgtatggat ctcatccttt ttatctggct ctggaggatg gaggatctgc tcatggagtg |
| 2161 | tttctgctga attctaatgc tatggatgta gtgctgcagc cttctcctgc tctgtcttgg |
| 2221 | agatctacag gaggaattct ggatgtgtat atttttctag gacctgagcc taagtctgtg |
| 2281 | gtgcagcagt atctggatgt agtgggatat ccttttatgc ctccttattg gggactggga |
| 2341 | tttcatctgt gtagatgggg atattcttct acagctatta caagacaggt ggttgagaat |
| 2401 | atgacaagag ctcattttcc tctggatgtg cagtggaatg atctagatta tatggattct |
| 2461 | agaagagatt ttacatttaa taaggatgga tttagagatt ttcctgctat ggtgcaggag |
| 2521 | ctgcatcagg gaggaagaag atatatgatg attgtggatc ctgctatttc ttcttctgga |
| 2581 | cctgctggat cttatagacc ttatgatgag ggactgagaa gaggagtgtt tattacaaat |
| 2641 | gagacaggac agcctctgat tggaaaggtg tggcctggat ctacagcttt tcctgatttt |
| 2701 | acaaatccta cagctctggc ttggtgggag gatatggtgg ctgagtttca tgatcaggtg |
| 2761 | ccttttgatg gaatgtggat tgatatgaat gagccttcta attttataag aggatctgag |
| 2821 | gatggatgtc ctaataatga gctagagaat cctccttatg tgcctggagt agtgggagga |
| 2881 | acactgcagg ctgctacaat ttgtgcttct tctcatcagt ttctgtctac acattataat |
| 2941 | ctgcataatc tgtatggact gacagaggct attgcttctc atagagctct ggtgaaggct |
| 3001 | agaggaacaa gaccttttgt gatttctaga tctacatttg ctggacatgg aagatatgct |
| 3061 | ggacattgga caggagatgt atggtcttct tgggagcagc tagcttcttc tgtgcctgag |
| 3121 | attctgcagt ttaatctgct aggagtgcct ctggtgggag ctgatgtgtg tggatttctg |
| 3181 | ggaaatacat ctgaggagct gtgtgtgaga tggacacagc tgggagcttt ttatcctttt |
| 3241 | atgagaaatc ataattctct gctgtctctg cctcaggagc cttattcttt ttctgagcct |
| 3301 | gctcagcagg ctatgagaaa ggctctgaca ctgagatatg ctctgctgcc tcatctgtat |
| 3361 | acactgtttc atcaggctca tgtggctgga gagacagtag ctagacctct gtttctggag |
| 3421 | tttcctaagg attcttctac atggacagtt gatcatcagc tgctgtgggg agaggctctg |
| 3481 | ctgattacac ctgtgctgca ggctggaaag gctgaggtga caggatattt tcctctggga |
| 3541 | acatggtatg atctgcagac agtgcctata gaggctctgg gatctctgcc tcctcctcct |
| 3601 | gctgctccta gagagcctgc tattcattct gagggacagt gggtgacact gcctgctcct |
| 3661 | ctggatacaa ttaatgtgca tctgagagct ggatatatta ttcctctgca gggacctgga |
| 3721 | ctgacaacaa cagagtctag acagcagcct atggctctgg ctgtggctct gacaaaggga |
| 3781 | ggagaggcta gaggagagct gttttgggat gatggagagt ctctggaggt gctggagaga |
| 3841 | ggagcttata cacaggtgat ttttctggct agaaataata caattgtgaa tgagctggtg |
| 3901 | agagtgacat ctgagggagc tggactgcag ctgcagaagg tgacagtgct gggagtggct |
| 3961 | acagctcctc agcaggtgct gtctaatgga gtgcctgtgt ctaattttac atattctcct |
| 4021 | gatacaaagg tgctggatat ttgtgtgtct ctgctgatgg gagagcagtt tctggtgtct |
| 4081 | tggtgttaat gatttaaatc tcgagccggg cggagtgtgt tagtctctcc agagggaggc |
| 4141 | tggttcccca gggaagcaga gcctgtgtgc gggcagcagc tgtgtgcggg cctgggggtt |
| 4201 | gttaagtgca attattttta ataaaagggg catttggaaa aaaaaaaaaa aggtagcagt |
| 4261 | cgacagatga attctgcaga tctgtggctt ctagctgccc gggtggcatc cctgtgaccc |
| 4321 | ctccccagtg cctctcctgg ccctggaagt tgccactcca gtgcccacca gccttgtcct |
| 4381 | aataaaatta agttgcatca ttttgtctga ctaggtgtcc ttctataata ttatggggtg |
| 4441 | gaggggggtg gtatggagca aggggcaagt tgggaagaca acctgtaggg cctgcggggt |
| 4501 | ctattgggaa ccaagctgga gtgcagtggc acaatcttgg ctcactgcaa tctccgcctc |
| 4561 | ctgggttcaa gcgattctcc tgcctcagcc tcccgagttg ttgggattcc aggcatgcat |
| 4621 | gaccaggctc agctaatttt tgtttttttg gtagagacgg ggtttcacca tattggccag |
| 4681 | gctggtctcc aactcctaat ctcaggtgat ctacccacct tggcctccca aattgctggg |
| 4741 | attacaggcg tgaaccactg ctcccttccc tgtccttctg attttaaaaa aaagagaaat |
| 4801 | gttctggcac ctgcacttgc actggggaca gcctattttg ctagtttgtt ttgtttcgtt |
| 4861 | ttgttttgat ggagagcgta tgttgtttaa acgcggccgc gtagataagt agcatggcgg |
| 4921 | gttaatcatt aactacaagg aacccctagt gatggagttg gccactccct ctctgcgcgc |
| 4981 | tcgctcgctc actgaggccg ggcgaccaaa ggtcgcccga cgcccgggct ttgcccgggc |
| 5041 | ggcctcagtg agcgagcgag cgcgcagtta attaaggcgc cctaggccga cccttagact |
| 5101 | ctgtactcag ttctataaac gagccattgg atacgagatc cgtagattga taagggacac |
| 5161 | ggaatatccc cggacgcaat agacaccggt ggacagcttg gtatcctgag cacagtcgcg |
| 5221 | cgtccgaatc tagctctact ttagaggccc cggattctga tggtcgtaga ccgcagaacc |
| 5281 | gattgggggg atgagatcta ctagttatca gcacacaatt gcccattata cgcgcgtata |
| 5341 | atggactatt gtgtgctgat atagggataa cagggtaatt ctagagctag catatggatc |
| 5401 | catcgatttg atgcggtatt ttctccttac gcatctgtgc ggtatttcac accgcatacg |
| 5461 | tcaaagcaac catagtacgc gccctgtagc ggcgcattaa gcgcggcggg tgtggtggtt |
| 5521 | acgcgcagcg tgaccgctac acttgccagc gccctagcgc ccgctccttt cgctttcttc |
| 5581 | ccttcctttc tcgccacgtt cgccggcttt ccccgtcaag ctctaaatcg ggggctccct |
| 5641 | ttagggttcc gatttagtgc tttacggcac ctcgacccca aaaaacttga tttgggtgat |
| 5701 | ggttcacgta gtgggccatc gccctgatag acggtttttc gccctttgac gttggagtcc |
| 5761 | acgttcttta atagtggact cttgttccaa actggaacaa cactcaactc tatctcgggc |
| 5821 | tattcttttg atttataagg gattttgccg atttcggtct attggttaaa aaatgagctg |
| 5881 | atttaacaaa aatttaacgc gaattttaac aaaatattaa cgtttacaat tttatggtgc |
| 5941 | actctcagta caatctgctc tgatgccgca tagttaagcc agccccgaca cccgccaaca |
| 6001 | cccgctgacg cgccctgacg ggcttgtctg ctcccggcat ccgcttacag acaagctgtg |
| 6061 | accgtctccg ggagctgcat gtgtcagagg ttttcaccgt catcaccgaa acgcgcgaga |
| 6121 | cgaaagggcc tcgtgatacg cctattttta taggttaatg tcatgataat aatggtttct |
| 6181 | tagacgtcag gtggcacttt tcggggaaat gtgcgcggaa cccctatttg tttatttttc |
| 6241 | taaatacatt caaatatgta tccgctcatg agacaataac cctgataaat gcttcaataa |
| 6301 | tattgaaaaa ggaagagtat gagccatatt caacgggaaa cgtcgaggcc gcgattaaat |
| 6361 | tccaacatgg atgctgattt atatgggtat aaatgggctc gcgataatgt cgggcaatca |
| 6421 | ggtgcgacaa tctatcgctt gtatgggaag cccgatgcgc cagagttgtt tctgaaacat |
| 6481 | ggcaaaggta gcgttgccaa tgatgttaca gatgagatgg tcagactaaa ctggctgacg |
| 6541 | gaatttatgc ctcttccgac catcaagcat tttatccgta ctcctgatga tgcatggtta |
| 6601 | ctcaccactg cgatccccgg aaaaacagca ttccaggtat tagaagaata tcctgattca |
| 6661 | ggtgaaaata ttgttgatgc gctggcagtg ttcctgcgcc ggttgcattc gattcctgtt |
| 6721 | tgtaattgtc cttttaacag cgatcgcgta tttcgtctcg ctcaggcgca atcacgaatg |
| 6781 | aataacggtt tggttgatgc gagtgatttt gatgacgagc gtaatggctg gcctgttgaa |
| 6841 | caagtctgga aagaaatgca taaacttttg ccattctcac cggattcagt cgtcactcat |
| 6901 | ggtgatttct cacttgataa ccttattttt gacgagggga aattaatagg ttgtattgat |
| 6961 | gttggacgag tcggaatcgc agaccgatac caggatcttg ccatcctatg gaactgcctc |
| 7021 | ggtgagtttt ctccttcatt acagaaacgg ctttttcaaa aatatggtat tgataatcct |
| 7081 | gatatgaata aattgcagtt tcatttgatg ctcgatgagt ttttctaagc gtataatggt |
| 7141 | ctagagctag catatggatc catcgattcc attatacgcc tgtcagacca agtttactca |
| 7201 | tatatacttt agattgattt aaaacttcat ttttaattta aaaggatcta ggtgaagatc |
| 7261 | ctttttgata atctcatgac caaaatccct taacgtgagt tttcgttcca ctgagcgtca |
| 7321 | gaccccgtag aaaagatcaa aggatcttct tgagatcctt tttttctgcg cgtaatctgc |
| 7381 | tgcttgcaaa caaaaaaacc accgctacca gcggtggttt gtttgccgga tcaagagcta |
| 7441 | ccaactcttt ttccgaaggt aactggcttc agcagagcgc agataccaaa tactgttctt |
| 7501 | ctagtgtagc cgtagttagg ccaccacttc aagaactctg tagcaccgcc tacatacctc |
| 7561 | gctctgctaa tcctgttacc agtggctgct gccagtggcg ataagtcgtg tcttaccggg |
| 7621 | ttggactcaa gacgatagtt accggataag gcgcagcggt cgggctgaac ggggggttcg |
| 7681 | tgcacacagc ccagcttgga gcgaacgacc tacaccgaac tgagatacct acagcgtgag |
| 7741 | ctatgagaaa gcgccacgct tcccgaaggg agaaaggcgg acaggtatcc ggtaagcggc |
| 7801 | agggtcggaa caggagagcg cacgagggag cttccagggg gaaacgcctg gtatctttat |
| 7861 | agtcctgtcg ggtttcgcca cctctgactt gagcgtcgat ttttgtgatg ctcgtcaggg |
| 7921 | gggcggagcc tatggaaaaa cgccagcaac gcggcctttt tacggttcct ggccttttgc |
| 7981 | tggccttttg ctcacatgt |

| pP090_seq3-201Ig_11-56 deletion (SEQ ID NO: 495) | |
|---|---|
| (SEQ ID NO: 495) | |
| 1 | tctagagcta gcatatggat ccatcgattt agggataaca gggtaattat cagcacacaa |
| 61 | ttgcccatta tacgcgcgta taatggacta ttgtgtgctg atatctgtac acttaagggc |
| 121 | tagatcttag cttacgtcac tagagggtcc acgtttagtt tttaagatcc attgatctcc |
| 181 | taaacgctgc aagattcgca acctggtata cttagcctag gcgctaggtc ctagtgcagc |
| 241 | gggacttttt ttctaaagtc gttgagagga ggagtcgtca gaccagatag ctttgatgtc |
| 301 | ctgatcggaa ggatcgttgg cccccctgca ggcagctgtt aattaactgc gcgctcgctc |
| 361 | gctcactgag gccgcccggg caaagcccgg gcgtcgggcg acctttggtc gcccggcctc |
| 421 | agtgagcgag cgagcgcgca gagagggagt ggccaactcc atcactaggg gttccttgta |
| 481 | gttaatgatt aacccgccat gctacttatc tacggcgcgc cacgcgttct aggagttaat |
| 541 | ttttaaaaag cagtcaaaag tccaagtgcc cttgcgagca tttactctct ctgtttgctc |
| 601 | tggttaataa tctcaggagc acaaacattc cttactagtt ctaggagtta atttttaaaa |
| 661 | agcagtcaaa agtccaagtg cccttgcgag catttactct ctctgtttgc tctggttaat |
| 721 | aatctcagga gcacaaacat tccttactag ttctagagcg gccgccagtg tgctggaatt |
| 781 | cggctttttt agggctggaa gctacctttg acatcatttc ctctgcgaat gcatgtataa |
| 841 | tttctacaga acctattaga aaggatcacc cagcctctgc ttttgtacaa ctttccctta |
| 901 | aaaaactgcc aatcccactg ctgtttggcc caatagtgag aactttttcc tgctgcctct |
| 961 | tggtgctttt gcctatggcc cctattctgc ctgctgaaga cactcttgcc agcatggact |
| 1021 | taaacccctc cagctctgac aatcctcttt ctcttttgtt ttacatgaag ggtctggcag |
| 1081 | ccaaagcaat cactcaaagt tcaaacctta tcattttttg ctttgttcct cttggccttg |
| 1141 | gttttgtaca tcagctttga aaataccatc ccagggttaa tgctggggtt aatttataac |
| 1201 | tgagagtgct ctagttctgc aatacaggac atgctataaa aatggaaaga tgttgctttc |
| 1261 | tgagagatca ggtggattct tgggcatttg cttaagcttg gtaccgccac catgggggtg |
| 1321 | aggcaccctc cctgttctca tgagtttggg ctgagctggg tctttctggt ggccctgctg |
| 1381 | aagggagtcc agtgtgagca gcagggagct tctagacctg gacctagaga tgctcaggct |
| 1441 | catcctggaa gacctagagc tgtgcctaca cagtgtgatg tgcctcctaa ttctagattt |
| 1501 | gattgtgctc ctgataaggc tataacacag gagcagtgtg aggctagagg atgttgttat |
| 1561 | attcctgcta agcagggact gcagggagct cagatgggac agccttggtg tttttttcct |
| 1621 | ccttcttatc cttcttataa gctggagaat ctgtcttctt ctgagatggg atatacagct |
| 1681 | acactgacaa gaacaacacc tacatttttt cctaaggata ttctgacact gagactggat |
| 1741 | gtgatgatgg agacagagaa tagactgcat tttacaatta aggatcctgc taatagaaga |
| 1801 | tatgaggtgc ctctagagac acctagagtg cattctagag ctccttctcc tctgtattct |
| 1861 | gtggagtttt ctgaggagcc ttttggagtg attgtgcata gacagctgga tggaagagtg |
| 1921 | ctgctgaata caacagtggc tcctctgttt tttgctgatc agtttctgca gctgtctaca |
| 1981 | tctctgcctt ctcagtatat tacaggactg gctgagcatc tgtctcctct gatgctgtct |
| 2041 | acatcttgga caagaattac actgtggaat agagatctgg ctcctacacc tggagctaat |
| 2101 | ctgtatggat ctcatccttt ttatctggct ctggaggatg gaggatctgc tcatggagtg |
| 2161 | tttctgctga attctaatgc tatggatgta gtgctgcagc cttctcctgc tctgtcttgg |
| 2221 | agatctacag gaggaattct ggatgtgtat atttttctag gacctgagcc taagtctgtg |
| 2281 | gtgcagcagt atctggatgt agtgggatat ccttttatgc ctccttattg gggactggga |
| 2341 | tttcatctgt gtagatgggg atattcttct acagctatta caagacaggt ggttgagaat |
| 2401 | atgacaagag ctcattttcc tctggatgtg cagtggaatg atctagatta tatggattct |
| 2461 | agaagagatt ttacatttaa taaggatgga tttagagatt ttcctgctat ggtgcaggag |
| 2521 | ctgcatcagg gaggaagaag atatatgatg attgtggatc ctgctatttc ttcttctgga |
| 2581 | cctgctggat cttatagacc ttatgatgag ggactgagaa gaggagtgtt tattacaaat |
| 2641 | gagacaggac agcctctgat tggaaaggtg tggcctggat ctacagcttt tcctgatttt |
| 2701 | acaaatccta cagctctggc ttggtgggag gatatggtgg ctgagtttca tgatcaggtg |
| 2761 | ccttttgatg gaatgtggat tgatatgaat gagccttcta attttataag aggatctgag |
| 2821 | gatggatgtc ctaataatga gctagagaat cctccttatg tgcctggagt agtgggagga |
| 2881 | acactgcagg ctgctacaat ttgtgcttct tctcatcagt ttctgtctac acattataat |
| 2941 | ctgcataatc tgtatggact gacagaggct attgcttctc atagagctct ggtgaaggct |
| 3001 | agaggaacaa gaccttttgt gatttctaga tctacatttg ctggacatgg aagatatgct |
| 3061 | ggacattgga caggagatgt atggtcttct tgggagcagc tagcttcttc tgtgcctgag |
| 3121 | attctgcagt ttaatctgct aggagtgcct ctggtgggag ctgatgtgtg tggatttctg |
| 3181 | ggaaatacat ctgaggagct gtgtgtgaga tggacacagc tgggagcttt ttatcctttt |
| 3241 | atgagaaatc ataattctct gctgtctctg cctcaggagc cttattcttt ttctgagcct |
| 3301 | gctcagcagg ctatgagaaa ggctctgaca ctgagatatg ctctgctgcc tcatctgtat |
| 3361 | acactgtttc atcaggctca tgtggctgga gagacagtag ctagacctct gtttctggag |
| 3421 | tttcctaagg attcttctac atggacagtt gatcatcagc tgctgtgggg agaggctctg |
| 3481 | ctgattacac ctgtgctgca ggctggaaag gctgaggtga caggatattt tcctctggga |
| 3541 | acatggtatg atctgcagac agtgcctata gaggctctgg gatctctgcc tcctcctcct |
| 3601 | gctgctccta gagagcctgc tattcattct gagggacagt gggtgacact gcctgctcct |
| 3661 | ctggatacaa ttaatgtgca tctgagagct ggatatatta ttcctctgca gggacctgga |
| 3721 | ctgacaacaa cagagtctag acagcagcct atggctctgg ctgtggctct gacaaaggga |
| 3781 | ggagaggcta gaggagagct gttttgggat gatggagagt ctctggaggt gctggagaga |
| 3841 | ggagcttata cacaggtgat ttttctggct agaaataata caattgtgaa tgagctggtg |
| 3901 | agagtgacat ctgagggagc tggactgcag ctgcagaagg tgacagtgct gggagtggct |
| 3961 | acagctcctc agcaggtgct gtctaatgga gtgcctgtgt ctaattttac atattctcct |
| 4021 | gatacaaagg tgctggatat ttgtgtgtct ctgctgatgg gagagcagtt tctggtgtct |
| 4081 | tggtgttaat gatttaaatc tcgagccggg cggagtgtgt tagtctctcc agagggaggc |
| 4141 | tggttcccca gggaagcaga gcctgtgtgc gggcagcagc tgtgtgcggg cctgggggtt |
| 4201 | gttaagtgca attattttta ataaaagggg catttggaaa aaaaaaaaaa aggtagcagt |
| 4261 | cgacagatga attctgcaga tctgtggctt ctagctgccc gggtggcatc cctgtgaccc |
| 4321 | ctccccagtg cctctcctgg ccctggaagt tgccactcca gtgcccacca gccttgtcct |
| 4381 | aataaaatta agttgcatca ttttgtctga ctaggtgtcc ttctataata ttatggggtg |
| 4441 | gaggggggtg gtatggagca aggggcaagt tgggaagaca acctgtaggg cctgcggggt |
| 4501 | ctattgggaa ccaagctgga gtgcagtggc acaatcttgg ctcactgcaa tctccgcctc |
| 4561 | ctgggttcaa gcgattctcc tgcctcagcc tcccgagttg ttgggattcc aggcatgcat |
| 4621 | gaccaggctc agctaatttt tgtttttttg gtagagacgg ggtttcacca tattggccag |
| 4681 | gctggtctcc aactcctaat ctcaggtgat ctacccacct tggcctccca aattgctggg |
| 4741 | attacaggcg tgaaccactg ctcccttccc tgtccttctg attttaaaaa aaagagaaat |
| 4801 | gttctggcac ctgcacttgc actggggaca gcctattttg ctagtttgtt ttgtttcgtt |
| 4861 | ttgttttgat ggagagcgta tgttgtttaa acgcggccgc gtagataagt agcatggcgg |
| 4921 | gttaatcatt aactacaagg aacccctagt gatggagttg gccactccct ctctgcgcgc |
| 4981 | tcgctcgctc actgaggccg ggcgaccaaa ggtcgcccga cgcccgggct ttgcccgggc |
| 5041 | ggcctcagtg agcgagcgag cgcgcagtta attaaggcgc cctaggccga cccttagact |
| 5101 | ctgtactcag ttctataaac gagccattgg atacgagatc cgtagattga taagggacac |
| 5161 | ggaatatccc cggacgcaat agacaccggt ggacagcttg gtatcctgag cacagtcgcg |
| 5221 | cgtccgaatc tagctctact ttagaggccc cggattctga tggtcgtaga ccgcagaacc |
| 5281 | gattgggggg atgagatcta ctagttatca gcacacaatt gcccattata cgcgcgtata |
| 5341 | atggactatt gtgtgctgat atagggataa cagggtaatt ctagagctag catatggatc |
| 5401 | catcgatttg atgcggtatt ttctccttac gcatctgtgc ggtatttcac accgcatacg |
| 5461 | tcaaagcaac catagtacgc gccctgtagc ggcgcattaa gcgcggcggg tgtggtggtt |
| 5521 | acgcgcagcg tgaccgctac acttgccagc gccctagcgc ccgctccttt cgctttcttc |
| 5581 | ccttcctttc tcgccacgtt cgccggcttt ccccgtcaag ctctaaatcg ggggctccct |
| 5641 | ttagggttcc gatttagtgc tttacggcac ctcgacccca aaaaacttga tttgggtgat |
| 5701 | ggttcacgta gtgggccatc gccctgatag acggtttttc gccctttgac gttggagtcc |
| 5761 | acgttcttta atagtggact cttgttccaa actggaacaa cactcaactc tatctcgggc |
| 5821 | tattcttttg atttataagg gattttgccg atttcggtct attggttaaa aaatgagctg |
| 5881 | atttaacaaa aatttaacgc gaattttaac aaaatattaa cgtttacaat tttatggtgc |
| 5941 | actctcagta caatctgctc tgatgccgca tagttaagcc agccccgaca cccgccaaca |
| 6001 | cccgctgacg cgccctgacg ggcttgtctg ctcccggcat ccgcttacag acaagctgtg |
| 6061 | accgtctccg ggagctgcat gtgtcagagg ttttcaccgt catcaccgaa acgcgcgaga |
| 6121 | cgaaagggcc tcgtgatacg cctattttta taggttaatg tcatgataat aatggtttct |
| 6181 | tagacgtcag gtggcacttt tcggggaaat gtgcgcggaa cccctatttg tttatttttc |
| 6241 | taaatacatt caaatatgta tccgctcatg agacaataac cctgataaat gcttcaataa |
| 6301 | tattgaaaaa ggaagagtat gagccatatt caacgggaaa cgtcgaggcc gcgattaaat |
| 6361 | tccaacatgg atgctgattt atatgggtat aaatgggctc gcgataatgt cgggcaatca |
| 6421 | ggtgcgacaa tctatcgctt gtatgggaag cccgatgcgc cagagttgtt tctgaaacat |
| 6481 | ggcaaaggta gcgttgccaa tgatgttaca gatgagatgg tcagactaaa ctggctgacg |
| 6541 | gaatttatgc ctcttccgac catcaagcat tttatccgta ctcctgatga tgcatggtta |
| 6601 | ctcaccactg cgatccccgg aaaaacagca ttccaggtat tagaagaata tcctgattca |
| 6661 | ggtgaaaata ttgttgatgc gctggcagtg ttcctgcgcc ggttgcattc gattcctgtt |
| 6721 | tgtaattgtc cttttaacag cgatcgcgta tttcgtctcg ctcaggcgca atcacgaatg |
| 6781 | aataacggtt tggttgatgc gagtgatttt gatgacgagc gtaatggctg gcctgttgaa |
| 6841 | caagtctgga aagaaatgca taaacttttg ccattctcac cggattcagt cgtcactcat |
| 6901 | ggtgatttct cacttgataa ccttattttt gacgagggga aattaatagg ttgtattgat |
| 6961 | gttggacgag tcggaatcgc agaccgatac caggatcttg ccatcctatg gaactgcctc |
| 7021 | ggtgagtttt ctccttcatt acagaaacgg ctttttcaaa aatatggtat tgataatcct |
| 7081 | gatatgaata aattgcagtt tcatttgatg ctcgatgagt ttttctaagc gtataatggt |
| 7141 | ctagagctag catatggatc catcgattcc attatacgcc tgtcagacca agtttactca |
| 7201 | tatatacttt agattgattt aaaacttcat ttttaattta aaaggatcta ggtgaagatc |
| 7261 | ctttttgata atctcatgac caaaatccct taacgtgagt tttcgttcca ctgagcgtca |
| 7321 | gaccccgtag aaaagatcaa aggatcttct tgagatcctt tttttctgcg cgtaatctgc |
| 7381 | tgcttgcaaa caaaaaaacc accgctacca gcggtggttt gtttgccgga tcaagagcta |
| 7441 | ccaactcttt ttccgaaggt aactggcttc agcagagcgc agataccaaa tactgttctt |
| 7501 | ctagtgtagc cgtagttagg ccaccacttc aagaactctg tagcaccgcc tacatacctc |
| 7561 | gctctgctaa tcctgttacc agtggctgct gccagtggcg ataagtcgtg tcttaccggg |
| 7621 | ttggactcaa gacgatagtt accggataag gcgcagcggt cgggctgaac ggggggttcg |
| 7681 | tgcacacagc ccagcttgga gcgaacgacc tacaccgaac tgagatacct acagcgtgag |
| 7741 | ctatgagaaa gcgccacgct tcccgaaggg agaaaggcgg acaggtatcc ggtaagcggc |
| 7801 | agggtcggaa caggagagcg cacgagggag cttccagggg gaaacgcctg gtatctttat |
| 7861 | agtcctgtcg ggtttcgcca cctctgactt gagcgtcgat ttttgtgatg ctcgtcaggg |
| 7921 | gggcggagcc tatggaaaaa cgccagcaac gcggcctttt tacggttcct ggccttttgc |
| 7981 | tggccttttg ctcacatgt |

| pP091_seq100-IL2wt_28-56 deletion (SEQ ID NO: 496) | |
|---|---|
| (SEQ ID NO: 496) | |
| 1 | tctagagcta gcatatggat ccatcgattt agggataaca gggtaattat cagcacacaa |
| 61 | ttgcccatta tacgcgcgta taatggacta ttgtgtgctg atatctgtac acttaagggc |
| 121 | tagatcttag cttacgtcac tagagggtcc acgtttagtt tttaagatcc attgatctcc |
| 181 | taaacgctgc aagattcgca acctggtata cttagcctag gcgctaggtc ctagtgcagc |
| 241 | gggacttttt ttctaaagtc gttgagagga ggagtcgtca gaccagatag ctttgatgtc |
| 301 | ctgatcggaa ggatcgttgg cccccctgca ggcagctgtt aattaactgc gcgctcgctc |
| 361 | gctcactgag gccgcccggg caaagcccgg gcgtcgggcg acctttggtc gcccggcctc |
| 421 | agtgagcgag cgagcgcgca gagagggagt ggccaactcc atcactaggg gttccttgta |
| 481 | gttaatgatt aacccgccat gctacttatc tacggcgcgc cacgcgttct aggagttaat |
| 541 | ttttaaaaag cagtcaaaag tccaagtgcc cttgcgagca tttactctct ctgtttgctc |
| 601 | tggttaataa tctcaggagc acaaacattc cttactagtt ctaggagtta atttttaaaa |
| 661 | agcagtcaaa agtccaagtg cccttgcgag catttactct ctctgtttgc tctggttaat |
| 721 | aatctcagga gcacaaacat tccttactag ttctagagcg gccgccagtg tgctggaatt |
| 781 | cggctttttt agggctggaa gctacctttg acatcatttc ctctgcgaat gcatgtataa |
| 841 | tttctacaga acctattaga aaggatcacc cagcctctgc ttttgtacaa ctttccctta |
| 901 | aaaaactgcc aatcccactg ctgtttggcc caatagtgag aactttttcc tgctgcctct |
| 961 | tggtgctttt gcctatggcc cctattctgc ctgctgaaga cactcttgcc agcatggact |
| 1021 | taaacccctc cagctctgac aatcctcttt ctcttttgtt ttacatgaag ggtctggcag |
| 1081 | ccaaagcaat cactcaaagt tcaaacctta tcattttttg ctttgttcct cttggccttg |
| 1141 | gttttgtaca tcagctttga aaataccatc ccagggttaa tgctggggtt aatttataac |
| 1201 | tgagagtgct ctagttctgc aatacaggac atgctataaa aatggaaaga tgttgctttc |
| 1261 | tgagagatca ggtggattct tgggcatttg cttaagcttg gtaccgccac catgggggtg |
| 1321 | aggcaccctc cctgttctca caggctgctg gctgtgtgtg ctctggtgtc tctggccact |
| 1381 | gctgccctgc tgtacagaat gcagctgctg tcctgcattg cactgtcact ggcactggtt |
| 1441 | accaactcac agcagggggc cagcaggcca ggccccaggg atgcccaggc ccaccctggc |
| 1501 | agacccaggg ctgtgcccac ccagtgtgat gtgcctccca acagcagatt tgactgtgcc |
| 1561 | cctgataagg ccattactca ggaacagtgt gaggccaggg gctgctgcta tatccctgcc |
| 1621 | aagcagggcc tgcagggggc ccagatgggg cagccctggt gcttcttccc ccccagctac |
| 1681 | ccctcttata agctggagaa tctgagcagc tctgaaatgg gctacactgc cactctgacc |
| 1741 | aggactaccc ccaccttctt ccccaaggat attctgactc tgaggctgga tgtgatgatg |
| 1801 | gagactgaga acaggctgca cttcaccatc aaggaccctg ccaacaggag gtatgaggtg |
| 1861 | cccctggaaa ctcccagggt gcactctagg gcccccagcc ccctgtattc tgtggagttc |
| 1921 | tctgaggagc cttttggggt cattgtccac aggcagctgg atggcagggt gctgctgaat |
| 1981 | actactgtgg cccctctgtt ctttgctgac cagttcctgc agctgagcac cagcctgcct |
| 2041 | tctcagtaca ttactggcct ggctgagcat ctgagccccc tgatgctgag cacctcttgg |
| 2101 | accagaatca ccctgtggaa cagggacctg gctcccactc ctggggccaa cctgtatggc |
| 2161 | agccacccct tctacctggc cctggaggat gggggctctg cccatggggt gttcctgctg |
| 2221 | aacagcaatg ccatggatgt ggtgctgcag ccctctcctg ccctgtcttg gagatctact |
| 2281 | gggggcatcc tggatgtgta tatcttcctg gggcctgagc ccaagtctgt ggtgcagcag |
| 2341 | tacctggatg tggtgggcta ccccttcatg cccccctact ggggcctggg cttccacctg |
| 2401 | tgcaggtggg gctactcttc tactgctatc accaggcagg tggtggagaa catgaccagg |
| 2461 | gctcacttcc ctctggatgt gcagtggaat gacctggact acatggactc taggagagac |
| 2521 | ttcactttta ataaggatgg gttcagggac tttcctgcca tggtgcagga gctgcatcag |
| 2581 | gggggcagga gatatatgat gattgtggac cctgctattt ctagctctgg ccctgctggc |
| 2641 | agctataggc cctatgatga ggggctgagg aggggggtgt tcatcactaa tgagactggc |
| 2701 | cagcccctga ttggcaaggt gtggcctggc tctactgcct tccctgattt caccaacccc |
| 2761 | actgccctgg cctggtggga ggatatggtg gctgagtttc atgaccaggt gccctttgat |
| 2821 | ggcatgtgga ttgacatgaa tgagcccagc aactttatca ggggctctga agatggctgc |
| 2881 | cccaacaatg agctggagaa ccccccctat gtgcctgggg tggtgggggg caccctgcag |
| 2941 | gctgccacca tctgtgccag cagccaccag ttcctgagca cccactataa cctgcacaac |
| 3001 | ctgtatggcc tgactgaggc cattgcctct cacagggccc tggtgaaggc tagggggact |
| 3061 | aggccctttg tgatcagcag gtctactttt gctggccatg gcaggtatgc tgggcactgg |
| 3121 | actggggatg tgtggtctag ctgggagcag ctggccagct ctgtgcctga gatcctgcag |
| 3181 | tttaatctgc tgggggtgcc cctggtgggg gctgatgtgt gtggcttcct gggcaatacc |
| 3241 | tctgaggagc tgtgtgtgag gtggactcag ctgggggctt tctacccctt catgagaaac |
| 3301 | cacaactctc tgctgagcct gccccaggag ccctattctt tttctgagcc tgcccagcag |
| 3361 | gctatgagga aggccctgac tctgaggtat gccctgctgc cccacctgta taccctgttc |
| 3421 | catcaggccc atgtggctgg ggagactgtg gccagacctc tgttcctgga gttccccaag |
| 3481 | gatagctcta cttggactgt ggaccaccag ctgctgtggg gggaggctct gctgatcacc |
| 3541 | cctgtgctgc aggctgggaa ggctgaggtg actggctatt tccccctggg cacctggtat |
| 3601 | gatctgcaga ctgtgcccat tgaggccctg ggctctctgc cccctccccc tgctgccccc |
| 3661 | agggagcctg ccatccactc tgagggccag tgggtgaccc tgcctgcccc tctggacact |
| 3721 | atcaatgtgc acctgagggc tggctacatc atccccctgc agggccctgg cctgactacc |
| 3781 | actgagtcta ggcagcagcc catggccctg gctgtggctc tgaccaaggg gggggaggcc |
| 3841 | aggggggagc tgttctggga tgatggggag tctctggagg tgctggagag gggggcctac |
| 3901 | acccaggtga tcttcctggc taggaataac accattgtca atgagctggt gagggtgacc |
| 3961 | tctgaggggg ctggcctgca gctgcagaag gtgactgtgc tgggggtggc tactgccccc |
| 4021 | cagcaggtgc tgagcaatgg ggtgcctgtg agcaacttca cctatagccc tgacaccaag |
| 4081 | gtgctggaca tctgtgtgag cctgctgatg ggggagcagt tcctggtgag ctggtgctaa |
| 4141 | tttaaatctc gagccgggcg gagtgtgtta gtctctccag agggaggctg gttccccagg |
| 4201 | gaagcagagc ctgtgtgcgg gcagcagctg tgtgcgggcc tgggggttgt taagtgcaat |
| 4261 | tatttttaat aaaaggggca tttggaaaaa aaaaaaaaag gtagcagtcg acagatgaat |
| 4321 | tctgcagatc tgtggcttct agctgcccgg gtggcatccc tgtgacccct ccccagtgcc |
| 4381 | tctcctggcc ctggaagttg ccactccagt gcccaccagc cttgtcctaa taaaattaag |
| 4441 | ttgcatcatt ttgtctgact aggtgtcctt ctataatatt atggggtgga ggggggtggt |
| 4501 | atggagcaag gggcaagttg ggaagacaac ctgtagggcc tgcggggtct attgggaacc |
| 4561 | aagctggagt gcagtggcac aatcttggct cactgcaatc tccgcctcct gggttcaagc |
| 4621 | gattctcctg cctcagcctc ccgagttgtt gggattccag gcatgcatga ccaggctcag |
| 4681 | ctaatttttg tttttttggt agagacgggg tttcaccata ttggccaggc tggtctccaa |
| 4741 | ctcctaatct caggtgatct acccaccttg gcctcccaaa ttgctgggat tacaggcgtg |
| 4801 | aaccactgct cccttccctg tccttctgat tttaaaaaaa agagaaatgt tctggcacct |
| 4861 | gcacttgcac tggggacagc ctattttgct agtttgtttt gtttcgtttt gttttgatgg |
| 4921 | agagcgtatg ttgtttaaac gcggccgcgt agataagtag catggcgggt taatcattaa |
| 4981 | ctacaaggaa cccctagtga tggagttggc cactccctct ctgcgcgctc gctcgctcac |
| 5041 | tgaggccggg cgaccaaagg tcgcccgacg cccgggcttt gcccgggcgg cctcagtgag |
| 5101 | cgagcgagcg cgcagttaat taaggcgccc taggccgacc cttagactct gtactcagtt |
| 5161 | ctataaacga gccattggat acgagatccg tagattgata agggacacgg aatatccccg |
| 5221 | gacgcaatag acaccggtgg acagcttggt atcctgagca cagtcgcgcg tccgaatcta |
| 5281 | gctctacttt agaggccccg gattctgatg gtcgtagacc gcagaaccga ttggggggat |
| 5341 | gagatctact agttatcagc acacaattgc ccattatacg cgcgtataat ggactattgt |
| 5401 | gtgctgatat agggataaca gggtaattct agagctagca tatggatcca tcgatttgat |
| 5461 | gcggtatttt ctccttacgc atctgtgcgg tatttcacac cgcatacgtc aaagcaacca |
| 5521 | tagtacgcgc cctgtagcgg cgcattaagc gcggcgggtg tggtggttac gcgcagcgtg |
| 5581 | accgctacac ttgccagcgc cctagcgccc gctcctttcg ctttcttccc ttcctttctc |
| 5641 | gccacgttcg ccggctttcc ccgtcaagct ctaaatcggg ggctcccttt agggttccga |
| 5701 | tttagtgctt tacggcacct cgaccccaaa aaacttgatt tgggtgatgg ttcacgtagt |
| 5761 | gggccatcgc cctgatagac ggtttttcgc cctttgacgt tggagtccac gttctttaat |
| 5821 | agtggactct tgttccaaac tggaacaaca ctcaactcta tctcgggcta ttcttttgat |
| 5881 | ttataaggga ttttgccgat ttcggtctat tggttaaaaa atgagctgat ttaacaaaaa |
| 5941 | tttaacgcga attttaacaa aatattaacg tttacaattt tatggtgcac tctcagtaca |
| 6001 | atctgctctg atgccgcata gttaagccag ccccgacacc cgccaacacc cgctgacgcg |
| 6061 | ccctgacggg cttgtctgct cccggcatcc gcttacagac aagctgtgac cgtctccggg |
| 6121 | agctgcatgt gtcagaggtt ttcaccgtca tcaccgaaac gcgcgagacg aaagggcctc |
| 6181 | gtgatacgcc tatttttata ggttaatgtc atgataataa tggtttctta gacgtcaggt |
| 6241 | ggcacttttc ggggaaatgt gcgcggaacc cctatttgtt tatttttcta aatacattca |
| 6301 | aatatgtatc cgctcatgag acaataaccc tgataaatgc ttcaataata ttgaaaaagg |
| 6361 | aagagtatga gccatattca acgggaaacg tcgaggccgc gattaaattc caacatggat |
| 6421 | gctgatttat atgggtataa atgggctcgc gataatgtcg ggcaatcagg tgcgacaatc |
| 6481 | tatcgcttgt atgggaagcc cgatgcgcca gagttgtttc tgaaacatgg caaaggtagc |
| 6541 | gttgccaatg atgttacaga tgagatggtc agactaaact ggctgacgga atttatgcct |
| 6601 | cttccgacca tcaagcattt tatccgtact cctgatgatg catggttact caccactgcg |
| 6661 | atccccggaa aaacagcatt ccaggtatta gaagaatatc ctgattcagg tgaaaatatt |
| 6721 | gttgatgcgc tggcagtgtt cctgcgccgg ttgcattcga ttcctgtttg taattgtcct |
| 6781 | tttaacagcg atcgcgtatt tcgtctcgct caggcgcaat cacgaatgaa taacggtttg |
| 6841 | gttgatgcga gtgattttga tgacgagcgt aatggctggc ctgttgaaca agtctggaaa |
| 6901 | gaaatgcata aacttttgcc attctcaccg gattcagtcg tcactcatgg tgatttctca |
| 6961 | cttgataacc ttatttttga cgaggggaaa ttaataggtt gtattgatgt tggacgagtc |
| 7021 | ggaatcgcag accgatacca ggatcttgcc atcctatgga actgcctcgg tgagttttct |
| 7081 | ccttcattac agaaacggct ttttcaaaaa tatggtattg ataatcctga tatgaataaa |
| 7141 | ttgcagtttc atttgatgct cgatgagttt ttctaagcgt ataatggtct agagctagca |
| 7201 | tatggatcca tcgattccat tatacgcctg tcagaccaag tttactcata tatactttag |
| 7261 | attgatttaa aacttcattt ttaatttaaa aggatctagg tgaagatcct ttttgataat |
| 7321 | ctcatgacca aaatccctta acgtgagttt tcgttccact gagcgtcaga ccccgtagaa |
| 7381 | aagatcaaag gatcttcttg agatcctttt tttctgcgcg taatctgctg cttgcaaaca |
| 7441 | aaaaaaccac cgctaccagc ggtggtttgt ttgccggatc aagagctacc aactcttttt |
| 7501 | ccgaaggtaa ctggcttcag cagagcgcag ataccaaata ctgttcttct agtgtagccg |
| 7561 | tagttaggcc accacttcaa gaactctgta gcaccgccta catacctcgc tctgctaatc |
| 7621 | ctgttaccag tggctgctgc cagtggcgat aagtcgtgtc ttaccgggtt ggactcaaga |
| 7681 | cgatagttac cggataaggc gcagcggtcg ggctgaacgg ggggttcgtg cacacagccc |
| 7741 | agcttggagc gaacgaccta caccgaactg agatacctac agcgtgagct atgagaaagc |
| 7801 | gccacgcttc ccgaagggag aaaggcggac aggtatccgg taagcggcag ggtcggaaca |
| 7861 | ggagagcgca cgagggagct tccaggggga aacgcctggt atctttatag tcctgtcggg |
| 7921 | tttcgccacc tctgacttga gcgtcgattt ttgtgatgct cgtcaggggg gcggagccta |
| 7981 | tggaaaaacg ccagcaacgc ggccttttta cggttcctgg ccttttgctg gccttttgct |
| 8041 | cacatgt |

| pP092_seq100-201Ig_28-56 deletion (SEQ ID NO: 497) | |
|---|---|
| (SEQ ID NO: 497) | |
| 1 | tctagagcta gcatatggat ccatcgattt agggataaca gggtaattat cagcacacaa |
| 61 | ttgcccatta tacgcgcgta taatggacta ttgtgtgctg atatctgtac acttaagggc |
| 121 | tagatcttag cttacgtcac tagagggtcc acgtttagtt tttaagatcc attgatctcc |
| 181 | taaacgctgc aagattcgca acctggtata cttagcctag gcgctaggtc ctagtgcagc |
| 241 | gggacttttt ttctaaagtc gttgagagga ggagtcgtca gaccagatag ctttgatgtc |
| 301 | ctgatcggaa ggatcgttgg cccccctgca ggcagctgtt aattaactgc gcgctcgctc |
| 361 | gctcactgag gccgcccggg caaagcccgg gcgtcgggcg acctttggtc gcccggcctc |
| 421 | agtgagcgag cgagcgcgca gagagggagt ggccaactcc atcactaggg gttccttgta |
| 481 | gttaatgatt aacccgccat gctacttatc tacggcgcgc cacgcgttct aggagttaat |
| 541 | ttttaaaaag cagtcaaaag tccaagtgcc cttgcgagca tttactctct ctgtttgctc |
| 601 | tggttaataa tctcaggagc acaaacattc cttactagtt ctaggagtta atttttaaaa |
| 661 | agcagtcaaa agtccaagtg cccttgcgag catttactct ctctgtttgc tctggttaat |
| 721 | aatctcagga gcacaaacat tccttactag ttctagagcg gccgccagtg tgctggaatt |
| 781 | cggctttttt agggctggaa gctacctttg acatcatttc ctctgcgaat gcatgtataa |
| 841 | tttctacaga acctattaga aaggatcacc cagcctctgc ttttgtacaa ctttccctta |
| 901 | aaaaactgcc aatcccactg ctgtttggcc caatagtgag aactttttcc tgctgcctct |
| 961 | tggtgctttt gcctatggcc cctattctgc ctgctgaaga cactcttgcc agcatggact |
| 1021 | taaacccctc cagctctgac aatcctcttt ctcttttgtt ttacatgaag ggtctggcag |
| 1081 | ccaaagcaat cactcaaagt tcaaacctta tcattttttg ctttgttcct cttggccttg |
| 1141 | gttttgtaca tcagctttga aaataccatc ccagggttaa tgctggggtt aatttataac |
| 1201 | tgagagtgct ctagttctgc aatacaggac atgctataaa aatggaaaga tgttgctttc |
| 1261 | tgagagatca ggtggattct tgggcatttg cttaagcttg gtaccgccac catgggggtg |
| 1321 | aggcaccctc cctgttctca caggctgctg gctgtgtgtg ctctggtgtc tctggccact |
| 1381 | gctgccctgc tggagtttgg gctgagctgg gtctttctgg tggccctgct gaagggagtc |
| 1441 | cagtgtgagc agcagggggc cagcaggcca ggccccaggg atgcccaggc ccaccctggc |
| 1501 | agacccaggg ctgtgcccac ccagtgtgat gtgcctccca acagcagatt tgactgtgcc |
| 1561 | cctgataagg ccattactca ggaacagtgt gaggccaggg gctgctgcta tatccctgcc |
| 1621 | aagcagggcc tgcagggggc ccagatgggg cagccctggt gcttcttccc ccccagctac |
| 1681 | ccctcttata agctggagaa tctgagcagc tctgaaatgg gctacactgc cactctgacc |
| 1741 | aggactaccc ccaccttctt ccccaaggat attctgactc tgaggctgga tgtgatgatg |
| 1801 | gagactgaga acaggctgca cttcaccatc aaggaccctg ccaacaggag gtatgaggtg |
| 1861 | cccctggaaa ctcccagggt gcactctagg gcccccagcc ccctgtattc tgtggagttc |
| 1921 | tctgaggagc cttttggggt cattgtccac aggcagctgg atggcagggt gctgctgaat |
| 1981 | actactgtgg cccctctgtt ctttgctgac cagttcctgc agctgagcac cagcctgcct |
| 2041 | tctcagtaca ttactggcct ggctgagcat ctgagccccc tgatgctgag cacctcttgg |
| 2101 | accagaatca ccctgtggaa cagggacctg gctcccactc ctggggccaa cctgtatggc |
| 2161 | agccacccct tctacctggc cctggaggat gggggctctg cccatggggt gttcctgctg |
| 2221 | aacagcaatg ccatggatgt ggtgctgcag ccctctcctg ccctgtcttg gagatctact |
| 2281 | gggggcatcc tggatgtgta tatcttcctg gggcctgagc ccaagtctgt ggtgcagcag |
| 2341 | tacctggatg tggtgggcta ccccttcatg cccccctact ggggcctggg cttccacctg |
| 2401 | tgcaggtggg gctactcttc tactgctatc accaggcagg tggtggagaa catgaccagg |
| 2461 | gctcacttcc ctctggatgt gcagtggaat gacctggact acatggactc taggagagac |
| 2521 | ttcactttta ataaggatgg gttcagggac tttcctgcca tggtgcagga gctgcatcag |
| 2581 | gggggcagga gatatatgat gattgtggac cctgctattt ctagctctgg ccctgctggc |
| 2641 | agctataggc cctatgatga ggggctgagg aggggggtgt tcatcactaa tgagactggc |
| 2701 | cagcccctga ttggcaaggt gtggcctggc tctactgcct tccctgattt caccaacccc |
| 2761 | actgccctgg cctggtggga ggatatggtg gctgagtttc atgaccaggt gccctttgat |
| 2821 | ggcatgtgga ttgacatgaa tgagcccagc aactttatca ggggctctga agatggctgc |
| 2881 | cccaacaatg agctggagaa ccccccctat gtgcctgggg tggtgggggg caccctgcag |
| 2941 | gctgccacca tctgtgccag cagccaccag ttcctgagca cccactataa cctgcacaac |
| 3001 | ctgtatggcc tgactgaggc cattgcctct cacagggccc tggtgaaggc tagggggact |
| 3061 | aggccctttg tgatcagcag gtctactttt gctggccatg gcaggtatgc tgggcactgg |
| 3121 | actggggatg tgtggtctag ctgggagcag ctggccagct ctgtgcctga gatcctgcag |
| 3181 | tttaatctgc tgggggtgcc cctggtgggg gctgatgtgt gtggcttcct gggcaatacc |
| 3241 | tctgaggagc tgtgtgtgag gtggactcag ctgggggctt tctacccctt catgagaaac |
| 3301 | cacaactctc tgctgagcct gccccaggag ccctattctt tttctgagcc tgcccagcag |
| 3361 | gctatgagga aggccctgac tctgaggtat gccctgctgc cccacctgta taccctgttc |
| 3421 | catcaggccc atgtggctgg ggagactgtg gccagacctc tgttcctgga gttccccaag |
| 3481 | gatagctcta cttggactgt ggaccaccag ctgctgtggg gggaggctct gctgatcacc |
| 3541 | cctgtgctgc aggctgggaa ggctgaggtg actggctatt tccccctggg cacctggtat |
| 3601 | gatctgcaga ctgtgcccat tgaggccctg ggctctctgc cccctccccc tgctgccccc |
| 3661 | agggagcctg ccatccactc tgagggccag tgggtgaccc tgcctgcccc tctggacact |
| 3721 | atcaatgtgc acctgagggc tggctacatc atccccctgc agggccctgg cctgactacc |
| 3781 | actgagtcta ggcagcagcc catggccctg gctgtggctc tgaccaaggg gggggaggcc |
| 3841 | aggggggagc tgttctggga tgatggggag tctctggagg tgctggagag gggggcctac |
| 3901 | acccaggtga tcttcctggc taggaataac accattgtca atgagctggt gagggtgacc |
| 3961 | tctgaggggg ctggcctgca gctgcagaag gtgactgtgc tgggggtggc tactgccccc |
| 4021 | cagcaggtgc tgagcaatgg ggtgcctgtg agcaacttca cctatagccc tgacaccaag |
| 4081 | gtgctggaca tctgtgtgag cctgctgatg ggggagcagt tcctggtgag ctggtgctaa |
| 4141 | tttaaatctc gagccgggcg gagtgtgtta gtctctccag agggaggctg gttccccagg |
| 4201 | gaagcagagc ctgtgtgcgg gcagcagctg tgtgcgggcc tgggggttgt taagtgcaat |
| 4261 | tatttttaat aaaaggggca tttggaaaaa aaaaaaaaag gtagcagtcg acagatgaat |
| 4321 | tctgcagatc tgtggcttct agctgcccgg gtggcatccc tgtgacccct ccccagtgcc |
| 4381 | tctcctggcc ctggaagttg ccactccagt gcccaccagc cttgtcctaa taaaattaag |
| 4441 | ttgcatcatt ttgtctgact aggtgtcctt ctataatatt atggggtgga ggggggtggt |
| 4501 | atggagcaag gggcaagttg ggaagacaac ctgtagggcc tgcggggtct attgggaacc |
| 4561 | aagctggagt gcagtggcac aatcttggct cactgcaatc tccgcctcct gggttcaagc |
| 4621 | gattctcctg cctcagcctc ccgagttgtt gggattccag gcatgcatga ccaggctcag |
| 4681 | ctaatttttg tttttttggt agagacgggg tttcaccata ttggccaggc tggtctccaa |
| 4741 | ctcctaatct caggtgatct acccaccttg gcctcccaaa ttgctgggat tacaggcgtg |
| 4801 | aaccactgct cccttccctg tccttctgat tttaaaaaaa agagaaatgt tctggcacct |
| 4861 | gcacttgcac tggggacagc ctattttgct agtttgtttt gtttcgtttt gttttgatgg |
| 4921 | agagcgtatg ttgtttaaac gcggccgcgt agataagtag catggcgggt taatcattaa |
| 4981 | ctacaaggaa cccctagtga tggagttggc cactccctct ctgcgcgctc gctcgctcac |
| 5041 | tgaggccggg cgaccaaagg tcgcccgacg cccgggcttt gcccgggcgg cctcagtgag |
| 5101 | cgagcgagcg cgcagttaat taaggcgccc taggccgacc cttagactct gtactcagtt |
| 5161 | ctataaacga gccattggat acgagatccg tagattgata agggacacgg aatatccccg |
| 5221 | gacgcaatag acaccggtgg acagcttggt atcctgagca cagtcgcgcg tccgaatcta |
| 5281 | gctctacttt agaggccccg gattctgatg gtcgtagacc gcagaaccga ttggggggat |
| 5341 | gagatctact agttatcagc acacaattgc ccattatacg cgcgtataat ggactattgt |
| 5401 | gtgctgatat agggataaca gggtaattct agagctagca tatggatcca tcgatttgat |
| 5461 | gcggtatttt ctccttacgc atctgtgcgg tatttcacac cgcatacgtc aaagcaacca |
| 5521 | tagtacgcgc cctgtagcgg cgcattaagc gcggcgggtg tggtggttac gcgcagcgtg |
| 5581 | accgctacac ttgccagcgc cctagcgccc gctcctttcg ctttcttccc ttcctttctc |
| 5641 | gccacgttcg ccggctttcc ccgtcaagct ctaaatcggg ggctcccttt agggttccga |
| 5701 | tttagtgctt tacggcacct cgaccccaaa aaacttgatt tgggtgatgg ttcacgtagt |
| 5761 | gggccatcgc cctgatagac ggtttttcgc cctttgacgt tggagtccac gttctttaat |
| 5821 | agtggactct tgttccaaac tggaacaaca ctcaactcta tctcgggcta ttcttttgat |
| 5881 | ttataaggga ttttgccgat ttcggtctat tggttaaaaa atgagctgat ttaacaaaaa |
| 5941 | tttaacgcga attttaacaa aatattaacg tttacaattt tatggtgcac tctcagtaca |
| 6001 | atctgctctg atgccgcata gttaagccag ccccgacacc cgccaacacc cgctgacgcg |
| 6061 | ccctgacggg cttgtctgct cccggcatcc gcttacagac aagctgtgac cgtctccggg |
| 6121 | agctgcatgt gtcagaggtt ttcaccgtca tcaccgaaac gcgcgagacg aaagggcctc |
| 6181 | gtgatacgcc tatttttata ggttaatgtc atgataataa tggtttctta gacgtcaggt |
| 6241 | ggcacttttc ggggaaatgt gcgcggaacc cctatttgtt tatttttcta aatacattca |
| 6301 | aatatgtatc cgctcatgag acaataaccc tgataaatgc ttcaataata ttgaaaaagg |
| 6361 | aagagtatga gccatattca acgggaaacg tcgaggccgc gattaaattc caacatggat |
| 6421 | gctgatttat atgggtataa atgggctcgc gataatgtcg ggcaatcagg tgcgacaatc |
| 6481 | tatcgcttgt atgggaagcc cgatgcgcca gagttgtttc tgaaacatgg caaaggtagc |
| 6541 | gttgccaatg atgttacaga tgagatggtc agactaaact ggctgacgga atttatgcct |
| 6601 | cttccgacca tcaagcattt tatccgtact cctgatgatg catggttact caccactgcg |
| 6661 | atccccggaa aaacagcatt ccaggtatta gaagaatatc ctgattcagg tgaaaatatt |
| 6721 | gttgatgcgc tggcagtgtt cctgcgccgg ttgcattcga ttcctgtttg taattgtcct |
| 6781 | tttaacagcg atcgcgtatt tcgtctcgct caggcgcaat cacgaatgaa taacggtttg |
| 6841 | gttgatgcga gtgattttga tgacgagcgt aatggctggc ctgttgaaca agtctggaaa |
| 6901 | gaaatgcata aacttttgcc attctcaccg gattcagtcg tcactcatgg tgatttctca |
| 6961 | cttgataacc ttatttttga cgaggggaaa ttaataggtt gtattgatgt tggacgagtc |
| 7021 | ggaatcgcag accgatacca ggatcttgcc atcctatgga actgcctcgg tgagttttct |
| 7081 | ccttcattac agaaacggct ttttcaaaaa tatggtattg ataatcctga tatgaataaa |
| 7141 | ttgcagtttc atttgatgct cgatgagttt ttctaagcgt ataatggtct agagctagca |
| 7201 | tatggatcca tcgattccat tatacgcctg tcagaccaag tttactcata tatactttag |
| 7261 | attgatttaa aacttcattt ttaatttaaa aggatctagg tgaagatcct ttttgataat |
| 7321 | ctcatgacca aaatccctta acgtgagttt tcgttccact gagcgtcaga ccccgtagaa |
| 7381 | aagatcaaag gatcttcttg agatcctttt tttctgcgcg taatctgctg cttgcaaaca |
| 7441 | aaaaaaccac cgctaccagc ggtggtttgt ttgccggatc aagagctacc aactcttttt |
| 7501 | ccgaaggtaa ctggcttcag cagagcgcag ataccaaata ctgttcttct agtgtagccg |
| 7561 | tagttaggcc accacttcaa gaactctgta gcaccgccta catacctcgc tctgctaatc |
| 7621 | ctgttaccag tggctgctgc cagtggcgat aagtcgtgtc ttaccgggtt ggactcaaga |
| 7681 | cgatagttac cggataaggc gcagcggtcg ggctgaacgg ggggttcgtg cacacagccc |
| 7741 | agcttggagc gaacgaccta caccgaactg agatacctac agcgtgagct atgagaaagc |
| 7801 | gccacgcttc ccgaagggag aaaggcggac aggtatccgg taagcggcag ggtcggaaca |
| 7861 | ggagagcgca cgagggagct tccaggggga aacgcctggt atctttatag tcctgtcggg |
| 7921 | tttcgccacc tctgacttga gcgtcgattt ttgtgatgct cgtcaggggg gcggagccta |
| 7981 | tggaaaaacg ccagcaacgc ggccttttta cggttcctgg ccttttgctg gccttttgct |
| 8041 | cacatgt |

| pP093_seq3-IL2wt_28-56 deletion (SEQ ID NO: 498) | |
|---|---|
| (SEQ ID NO: 498) | |
| 1 | tctagagcta gcatatggat ccatcgattt agggataaca gggtaattat cagcacacaa |
| 61 | ttgcccatta tacgcgcgta taatggacta ttgtgtgctg atatctgtac acttaagggc |
| 121 | tagatcttag cttacgtcac tagagggtcc acgtttagtt tttaagatcc attgatctcc |
| 181 | taaacgctgc aagattcgca acctggtata cttagcctag gcgctaggtc ctagtgcagc |
| 241 | gggacttttt ttctaaagtc gttgagagga ggagtcgtca gaccagatag ctttgatgtc |
| 301 | ctgatcggaa ggatcgttgg cccccctgca ggcagctgtt aattaactgc gcgctcgctc |
| 361 | gctcactgag gccgcccggg caaagcccgg gcgtcgggcg acctttggtc gcccggcctc |
| 421 | agtgagcgag cgagcgcgca gagagggagt ggccaactcc atcactaggg gttccttgta |
| 481 | gttaatgatt aacccgccat gctacttatc tacggcgcgc cacgcgttct aggagttaat |
| 541 | ttttaaaaag cagtcaaaag tccaagtgcc cttgcgagca tttactctct ctgtttgctc |
| 601 | tggttaataa tctcaggagc acaaacattc cttactagtt ctaggagtta atttttaaaa |
| 661 | agcagtcaaa agtccaagtg cccttgcgag catttactct ctctgtttgc tctggttaat |
| 721 | aatctcagga gcacaaacat tccttactag ttctagagcg gccgccagtg tgctggaatt |
| 781 | cggctttttt agggctggaa gctacctttg acatcatttc ctctgcgaat gcatgtataa |
| 841 | tttctacaga acctattaga aaggatcacc cagcctctgc ttttgtacaa ctttccctta |
| 901 | aaaaactgcc aatcccactg ctgtttggcc caatagtgag aactttttcc tgctgcctct |
| 961 | tggtgctttt gcctatggcc cctattctgc ctgctgaaga cactcttgcc agcatggact |
| 1021 | taaacccctc cagctctgac aatcctcttt ctcttttgtt ttacatgaag ggtctggcag |
| 1081 | ccaaagcaat cactcaaagt tcaaacctta tcattttttg ctttgttcct cttggccttg |
| 1141 | gttttgtaca tcagctttga aaataccatc ccagggttaa tgctggggtt aatttataac |
| 1201 | tgagagtgct ctagttctgc aatacaggac atgctataaa aatggaaaga tgttgctttc |
| 1261 | tgagagatca ggtggattct tgggcatttg cttaagcttg gtaccgccac catgggggtg |
| 1321 | aggcaccctc cctgttctca caggctgctg gctgtgtgtg ctctggtgtc tctggccact |
| 1381 | gctgccctgc tgtacagaat gcagctgctg tcctgcattg cactgtcact ggcactggtt |
| 1441 | accaactcac agcagggagc ttctagacct ggacctagag atgctcaggc tcatcctgga |
| 1501 | agacctagag ctgtgcctac acagtgtgat gtgcctccta attctagatt tgattgtgct |
| 1561 | cctgataagg ctataacaca ggagcagtgt gaggctagag gatgttgtta tattcctgct |
| 1621 | aagcagggac tgcagggagc tcagatggga cagccttggt gtttttttcc tccttcttat |
| 1681 | ccttcttata agctggagaa tctgtcttct tctgagatgg gatatacagc tacactgaca |
| 1741 | agaacaacac ctacattttt tcctaaggat attctgacac tgagactgga tgtgatgatg |
| 1801 | gagacagaga atagactgca ttttacaatt aaggatcctg ctaatagaag atatgaggtg |
| 1861 | cctctagaga cacctagagt gcattctaga gctccttctc ctctgtattc tgtggagttt |
| 1921 | tctgaggagc cttttggagt gattgtgcat agacagctgg atggaagagt gctgctgaat |
| 1981 | acaacagtgg ctcctctgtt ttttgctgat cagtttctgc agctgtctac atctctgcct |
| 2041 | tctcagtata ttacaggact ggctgagcat ctgtctcctc tgatgctgtc tacatcttgg |
| 2101 | acaagaatta cactgtggaa tagagatctg gctcctacac ctggagctaa tctgtatgga |
| 2161 | tctcatcctt tttatctggc tctggaggat ggaggatctg ctcatggagt gtttctgctg |
| 2221 | aattctaatg ctatggatgt agtgctgcag ccttctcctg ctctgtcttg gagatctaca |
| 2281 | ggaggaattc tggatgtgta tatttttcta ggacctgagc ctaagtctgt ggtgcagcag |
| 2341 | tatctggatg tagtgggata tccttttatg cctccttatt ggggactggg atttcatctg |
| 2401 | tgtagatggg gatattcttc tacagctatt acaagacagg tggttgagaa tatgacaaga |
| 2461 | gctcattttc ctctggatgt gcagtggaat gatctagatt atatggattc tagaagagat |
| 2521 | tttacattta ataaggatgg atttagagat tttcctgcta tggtgcagga gctgcatcag |
| 2581 | ggaggaagaa gatatatgat gattgtggat cctgctattt cttcttctgg acctgctgga |
| 2641 | tcttatagac cttatgatga gggactgaga agaggagtgt ttattacaaa tgagacagga |
| 2701 | cagcctctga ttggaaaggt gtggcctgga tctacagctt ttcctgattt tacaaatcct |
| 2761 | acagctctgg cttggtggga ggatatggtg gctgagtttc atgatcaggt gccttttgat |
| 2821 | ggaatgtgga ttgatatgaa tgagccttct aattttataa gaggatctga ggatggatgt |
| 2881 | cctaataatg agctagagaa tcctccttat gtgcctggag tagtgggagg aacactgcag |
| 2941 | gctgctacaa tttgtgcttc ttctcatcag tttctgtcta cacattataa tctgcataat |
| 3001 | ctgtatggac tgacagaggc tattgcttct catagagctc tggtgaaggc tagaggaaca |
| 3061 | agaccttttg tgatttctag atctacattt gctggacatg gaagatatgc tggacattgg |
| 3121 | acaggagatg tatggtcttc ttgggagcag ctagcttctt ctgtgcctga gattctgcag |
| 3181 | tttaatctgc taggagtgcc tctggtggga gctgatgtgt gtggatttct gggaaataca |
| 3241 | tctgaggagc tgtgtgtgag atggacacag ctgggagctt tttatccttt tatgagaaat |
| 3301 | cataattctc tgctgtctct gcctcaggag ccttattctt tttctgagcc tgctcagcag |
| 3361 | gctatgagaa aggctctgac actgagatat gctctgctgc ctcatctgta tacactgttt |
| 3421 | catcaggctc atgtggctgg agagacagta gctagacctc tgtttctgga gtttcctaag |
| 3481 | gattcttcta catggacagt tgatcatcag ctgctgtggg gagaggctct gctgattaca |
| 3541 | cctgtgctgc aggctggaaa ggctgaggtg acaggatatt ttcctctggg aacatggtat |
| 3601 | gatctgcaga cagtgcctat agaggctctg ggatctctgc ctcctcctcc tgctgctcct |
| 3661 | agagagcctg ctattcattc tgagggacag tgggtgacac tgcctgctcc tctggataca |
| 3721 | attaatgtgc atctgagagc tggatatatt attcctctgc agggacctgg actgacaaca |
| 3781 | acagagtcta gacagcagcc tatggctctg gctgtggctc tgacaaaggg aggagaggct |
| 3841 | agaggagagc tgttttggga tgatggagag tctctggagg tgctggagag aggagcttat |
| 3901 | acacaggtga tttttctggc tagaaataat acaattgtga atgagctggt gagagtgaca |
| 3961 | tctgagggag ctggactgca gctgcagaag gtgacagtgc tgggagtggc tacagctcct |
| 4021 | cagcaggtgc tgtctaatgg agtgcctgtg tctaatttta catattctcc tgatacaaag |
| 4081 | gtgctggata tttgtgtgtc tctgctgatg ggagagcagt ttctggtgtc ttggtgttaa |
| 4141 | tgatttaaat ctcgagccgg gcggagtgtg ttagtctctc cagagggagg ctggttcccc |
| 4201 | agggaagcag agcctgtgtg cgggcagcag ctgtgtgcgg gcctgggggt tgttaagtgc |
| 4261 | aattattttt aataaaaggg gcatttggaa aaaaaaaaaa aaggtagcag tcgacagatg |
| 4321 | aattctgcag atctgtggct tctagctgcc cgggtggcat ccctgtgacc cctccccagt |
| 4381 | gcctctcctg gccctggaag ttgccactcc agtgcccacc agccttgtcc taataaaatt |
| 4441 | aagttgcatc attttgtctg actaggtgtc cttctataat attatggggt ggaggggggt |
| 4501 | ggtatggagc aaggggcaag ttgggaagac aacctgtagg gcctgcgggg tctattggga |
| 4561 | accaagctgg agtgcagtgg cacaatcttg gctcactgca atctccgcct cctgggttca |
| 4621 | agcgattctc ctgcctcagc ctcccgagtt gttgggattc caggcatgca tgaccaggct |
| 4681 | cagctaattt ttgttttttt ggtagagacg gggtttcacc atattggcca ggctggtctc |
| 4741 | caactcctaa tctcaggtga tctacccacc ttggcctccc aaattgctgg gattacaggc |
| 4801 | gtgaaccact gctcccttcc ctgtccttct gattttaaaa aaaagagaaa tgttctggca |
| 4861 | cctgcacttg cactggggac agcctatttt gctagtttgt tttgtttcgt tttgttttga |
| 4921 | tggagagcgt atgttgttta aacgcggccg cgtagataag tagcatggcg ggttaatcat |
| 4981 | taactacaag gaacccctag tgatggagtt ggccactccc tctctgcgcg ctcgctcgct |
| 5041 | cactgaggcc gggcgaccaa aggtcgcccg acgcccgggc tttgcccggg cggcctcagt |
| 5101 | gagcgagcga gcgcgcagtt aattaaggcg ccctaggccg acccttagac tctgtactca |
| 5161 | gttctataaa cgagccattg gatacgagat ccgtagattg ataagggaca cggaatatcc |
| 5221 | ccggacgcaa tagacaccgg tggacagctt ggtatcctga gcacagtcgc gcgtccgaat |
| 5281 | ctagctctac tttagaggcc ccggattctg atggtcgtag accgcagaac cgattggggg |
| 5341 | gatgagatct actagttatc agcacacaat tgcccattat acgcgcgtat aatggactat |
| 5401 | tgtgtgctga tatagggata acagggtaat tctagagcta gcatatggat ccatcgattt |
| 5461 | gatgcggtat tttctcctta cgcatctgtg cggtatttca caccgcatac gtcaaagcaa |
| 5521 | ccatagtacg cgccctgtag cggcgcatta agcgcggcgg gtgtggtggt tacgcgcagc |
| 5581 | gtgaccgcta cacttgccag cgccctagcg cccgctcctt tcgctttctt cccttccttt |
| 5641 | ctcgccacgt tcgccggctt tccccgtcaa gctctaaatc gggggctccc tttagggttc |
| 5701 | cgatttagtg ctttacggca cctcgacccc aaaaaacttg atttgggtga tggttcacgt |
| 5761 | agtgggccat cgccctgata gacggttttt cgccctttga cgttggagtc cacgttcttt |
| 5821 | aatagtggac tcttgttcca aactggaaca acactcaact ctatctcggg ctattctttt |
| 5881 | gatttataag ggattttgcc gatttcggtc tattggttaa aaaatgagct gatttaacaa |
| 5941 | aaatttaacg cgaattttaa caaaatatta acgtttacaa ttttatggtg cactctcagt |
| 6001 | acaatctgct ctgatgccgc atagttaagc cagccccgac acccgccaac acccgctgac |
| 6061 | gcgccctgac gggcttgtct gctcccggca tccgcttaca gacaagctgt gaccgtctcc |
| 6121 | gggagctgca tgtgtcagag gttttcaccg tcatcaccga aacgcgcgag acgaaagggc |
| 6181 | ctcgtgatac gcctattttt ataggttaat gtcatgataa taatggtttc ttagacgtca |
| 6241 | ggtggcactt ttcggggaaa tgtgcgcgga acccctattt gtttattttt ctaaatacat |
| 6301 | tcaaatatgt atccgctcat gagacaataa ccctgataaa tgcttcaata atattgaaaa |
| 6361 | aggaagagta tgagccatat tcaacgggaa acgtcgaggc cgcgattaaa ttccaacatg |
| 6421 | gatgctgatt tatatgggta taaatgggct cgcgataatg tcgggcaatc aggtgcgaca |
| 6481 | atctatcgct tgtatgggaa gcccgatgcg ccagagttgt ttctgaaaca tggcaaaggt |
| 6541 | agcgttgcca atgatgttac agatgagatg gtcagactaa actggctgac ggaatttatg |
| 6601 | cctcttccga ccatcaagca ttttatccgt actcctgatg atgcatggtt actcaccact |
| 6661 | gcgatccccg gaaaaacagc attccaggta ttagaagaat atcctgattc aggtgaaaat |
| 6721 | attgttgatg cgctggcagt gttcctgcgc cggttgcatt cgattcctgt ttgtaattgt |
| 6781 | ccttttaaca gcgatcgcgt atttcgtctc gctcaggcgc aatcacgaat gaataacggt |
| 6841 | ttggttgatg cgagtgattt tgatgacgag cgtaatggct ggcctgttga acaagtctgg |
| 6901 | aaagaaatgc ataaactttt gccattctca ccggattcag tcgtcactca tggtgatttc |
| 6961 | tcacttgata accttatttt tgacgagggg aaattaatag gttgtattga tgttggacga |
| 7021 | gtcggaatcg cagaccgata ccaggatctt gccatcctat ggaactgcct cggtgagttt |
| 7081 | tctccttcat tacagaaacg gctttttcaa aaatatggta ttgataatcc tgatatgaat |
| 7141 | aaattgcagt ttcatttgat gctcgatgag tttttctaag cgtataatgg tctagagcta |
| 7201 | gcatatggat ccatcgattc cattatacgc ctgtcagacc aagtttactc atatatactt |
| 7261 | tagattgatt taaaacttca tttttaattt aaaaggatct aggtgaagat cctttttgat |
| 7321 | aatctcatga ccaaaatccc ttaacgtgag ttttcgttcc actgagcgtc agaccccgta |
| 7381 | gaaaagatca aaggatcttc ttgagatcct ttttttctgc gcgtaatctg ctgcttgcaa |
| 7441 | acaaaaaaac caccgctacc agcggtggtt tgtttgccgg atcaagagct accaactctt |
| 7501 | tttccgaagg taactggctt cagcagagcg cagataccaa atactgttct tctagtgtag |
| 7561 | ccgtagttag gccaccactt caagaactct gtagcaccgc ctacatacct cgctctgcta |
| 7621 | atcctgttac cagtggctgc tgccagtggc gataagtcgt gtcttaccgg gttggactca |
| 7681 | agacgatagt taccggataa ggcgcagcgg tcgggctgaa cggggggttc gtgcacacag |
| 7741 | cccagcttgg agcgaacgac ctacaccgaa ctgagatacc tacagcgtga gctatgagaa |
| 7801 | agcgccacgc ttcccgaagg gagaaaggcg gacaggtatc cggtaagcgg cagggtcgga |
| 7861 | acaggagagc gcacgaggga gcttccaggg ggaaacgcct ggtatcttta tagtcctgtc |
| 7921 | gggtttcgcc acctctgact tgagcgtcga tttttgtgat gctcgtcagg ggggcggagc |
| 7981 | ctatggaaaa acgccagcaa cgcggccttt ttacggttcc tggccttttg ctggcctttt |
| 8041 | gctcacatgt |

| pP094_seq3-201Ig_28-56 deletion (SEQ ID NO: 499) | |
|---|---|
| (SEQ ID NO: 499) | |
| 1 | tctagagcta gcatatggat ccatcgattt agggataaca gggtaattat cagcacacaa |
| 61 | ttgcccatta tacgcgcgta taatggacta ttgtgtgctg atatctgtac acttaagggc |
| 121 | tagatcttag cttacgtcac tagagggtcc acgtttagtt tttaagatcc attgatctcc |
| 181 | taaacgctgc aagattcgca acctggtata cttagcctag gcgctaggtc ctagtgcagc |
| 241 | gggacttttt ttctaaagtc gttgagagga ggagtcgtca gaccagatag ctttgatgtc |
| 301 | ctgatcggaa ggatcgttgg cccccctgca ggcagctgtt aattaactgc gcgctcgctc |
| 361 | gctcactgag gccgcccggg caaagcccgg gcgtcgggcg acctttggtc gcccggcctc |
| 421 | agtgagcgag cgagcgcgca gagagggagt ggccaactcc atcactaggg gttccttgta |
| 481 | gttaatgatt aacccgccat gctacttatc tacggcgcgc cacgcgttct aggagttaat |
| 541 | ttttaaaaag cagtcaaaag tccaagtgcc cttgcgagca tttactctct ctgtttgctc |
| 601 | tggttaataa tctcaggagc acaaacattc cttactagtt ctaggagtta atttttaaaa |
| 661 | agcagtcaaa agtccaagtg cccttgcgag catttactct ctctgtttgc tctggttaat |
| 721 | aatctcagga gcacaaacat tccttactag ttctagagcg gccgccagtg tgctggaatt |
| 781 | cggctttttt agggctggaa gctacctttg acatcatttc ctctgcgaat gcatgtataa |
| 841 | tttctacaga acctattaga aaggatcacc cagcctctgc ttttgtacaa ctttccctta |
| 901 | aaaaactgcc aatcccactg ctgtttggcc caatagtgag aactttttcc tgctgcctct |
| 961 | tggtgctttt gcctatggcc cctattctgc ctgctgaaga cactcttgcc agcatggact |
| 1021 | taaacccctc cagctctgac aatcctcttt ctcttttgtt ttacatgaag ggtctggcag |
| 1081 | ccaaagcaat cactcaaagt tcaaacctta tcattttttg ctttgttcct cttggccttg |
| 1141 | gttttgtaca tcagctttga aaataccatc ccagggttaa tgctggggtt aatttataac |
| 1201 | tgagagtgct ctagttctgc aatacaggac atgctataaa aatggaaaga tgttgctttc |
| 1261 | tgagagatca ggtggattct tgggcatttg cttaagcttg gtaccgccac catgggggtg |
| 1321 | aggcaccctc cctgttctca caggctgctg gctgtgtgtg ctctggtgtc tctggccact |
| 1381 | gctgccctgc tggagtttgg gctgagctgg gtctttctgg tggccctgct gaagggagtc |
| 1441 | cagtgtgagc agcagggagc ttctagacct ggacctagag atgctcaggc tcatcctgga |
| 1501 | agacctagag ctgtgcctac acagtgtgat gtgcctccta attctagatt tgattgtgct |
| 1561 | cctgataagg ctataacaca ggagcagtgt gaggctagag gatgttgtta tattcctgct |
| 1621 | aagcagggac tgcagggagc tcagatggga cagccttggt gtttttttcc tccttcttat |
| 1681 | ccttcttata agctggagaa tctgtcttct tctgagatgg gatatacagc tacactgaca |
| 1741 | agaacaacac ctacattttt tcctaaggat attctgacac tgagactgga tgtgatgatg |
| 1801 | gagacagaga atagactgca ttttacaatt aaggatcctg ctaatagaag atatgaggtg |
| 1861 | cctctagaga cacctagagt gcattctaga gctccttctc ctctgtattc tgtggagttt |
| 1921 | tctgaggagc cttttggagt gattgtgcat agacagctgg atggaagagt gctgctgaat |
| 1981 | acaacagtgg ctcctctgtt ttttgctgat cagtttctgc agctgtctac atctctgcct |
| 2041 | tctcagtata ttacaggact ggctgagcat ctgtctcctc tgatgctgtc tacatcttgg |
| 2101 | acaagaatta cactgtggaa tagagatctg gctcctacac ctggagctaa tctgtatgga |
| 2161 | tctcatcctt tttatctggc tctggaggat ggaggatctg ctcatggagt gtttctgctg |
| 2221 | aattctaatg ctatggatgt agtgctgcag ccttctcctg ctctgtcttg gagatctaca |
| 2281 | ggaggaattc tggatgtgta tatttttcta ggacctgagc ctaagtctgt ggtgcagcag |
| 2341 | tatctggatg tagtgggata tccttttatg cctccttatt ggggactggg atttcatctg |
| 2401 | tgtagatggg gatattcttc tacagctatt acaagacagg tggttgagaa tatgacaaga |
| 2461 | gctcattttc ctctggatgt gcagtggaat gatctagatt atatggattc tagaagagat |
| 2521 | tttacattta ataaggatgg atttagagat tttcctgcta tggtgcagga gctgcatcag |
| 2581 | ggaggaagaa gatatatgat gattgtggat cctgctattt cttcttctgg acctgctgga |
| 2641 | tcttatagac cttatgatga gggactgaga agaggagtgt ttattacaaa tgagacagga |
| 2701 | cagcctctga ttggaaaggt gtggcctgga tctacagctt ttcctgattt tacaaatcct |
| 2761 | acagctctgg cttggtggga ggatatggtg gctgagtttc atgatcaggt gccttttgat |
| 2821 | ggaatgtgga ttgatatgaa tgagccttct aattttataa gaggatctga ggatggatgt |
| 2881 | cctaataatg agctagagaa tcctccttat gtgcctggag tagtgggagg aacactgcag |
| 2941 | gctgctacaa tttgtgcttc ttctcatcag tttctgtcta cacattataa tctgcataat |
| 3001 | ctgtatggac tgacagaggc tattgcttct catagagctc tggtgaaggc tagaggaaca |
| 3061 | agaccttttg tgatttctag atctacattt gctggacatg gaagatatgc tggacattgg |
| 3121 | acaggagatg tatggtcttc ttgggagcag ctagcttctt ctgtgcctga gattctgcag |
| 3181 | tttaatctgc taggagtgcc tctggtggga gctgatgtgt gtggatttct gggaaataca |
| 3241 | tctgaggagc tgtgtgtgag atggacacag ctgggagctt tttatccttt tatgagaaat |
| 3301 | cataattctc tgctgtctct gcctcaggag ccttattctt tttctgagcc tgctcagcag |
| 3361 | gctatgagaa aggctctgac actgagatat gctctgctgc ctcatctgta tacactgttt |
| 3421 | catcaggctc atgtggctgg agagacagta gctagacctc tgtttctgga gtttcctaag |
| 3481 | gattcttcta catggacagt tgatcatcag ctgctgtggg gagaggctct gctgattaca |
| 3541 | cctgtgctgc aggctggaaa ggctgaggtg acaggatatt ttcctctggg aacatggtat |
| 3601 | gatctgcaga cagtgcctat agaggctctg ggatctctgc ctcctcctcc tgctgctcct |
| 3661 | agagagcctg ctattcattc tgagggacag tgggtgacac tgcctgctcc tctggataca |
| 3721 | attaatgtgc atctgagagc tggatatatt attcctctgc agggacctgg actgacaaca |
| 3781 | acagagtcta gacagcagcc tatggctctg gctgtggctc tgacaaaggg aggagaggct |
| 3841 | agaggagagc tgttttggga tgatggagag tctctggagg tgctggagag aggagcttat |
| 3901 | acacaggtga tttttctggc tagaaataat acaattgtga atgagctggt gagagtgaca |
| 3961 | tctgagggag ctggactgca gctgcagaag gtgacagtgc tgggagtggc tacagctcct |
| 4021 | cagcaggtgc tgtctaatgg agtgcctgtg tctaatttta catattctcc tgatacaaag |
| 4081 | gtgctggata tttgtgtgtc tctgctgatg ggagagcagt ttctggtgtc ttggtgttaa |
| 4141 | tgatttaaat ctcgagccgg gcggagtgtg ttagtctctc cagagggagg ctggttcccc |
| 4201 | agggaagcag agcctgtgtg cgggcagcag ctgtgtgcgg gcctgggggt tgttaagtgc |
| 4261 | aattattttt aataaaaggg gcatttggaa aaaaaaaaaa aaggtagcag tcgacagatg |
| 4321 | aattctgcag atctgtggct tctagctgcc cgggtggcat ccctgtgacc cctccccagt |
| 4381 | gcctctcctg gccctggaag ttgccactcc agtgcccacc agccttgtcc taataaaatt |
| 4441 | aagttgcatc attttgtctg actaggtgtc cttctataat attatggggt ggaggggggt |
| 4501 | ggtatggagc aaggggcaag ttgggaagac aacctgtagg gcctgcgggg tctattggga |
| 4561 | accaagctgg agtgcagtgg cacaatcttg gctcactgca atctccgcct cctgggttca |
| 4621 | agcgattctc ctgcctcagc ctcccgagtt gttgggattc caggcatgca tgaccaggct |
| 4681 | cagctaattt ttgttttttt ggtagagacg gggtttcacc atattggcca ggctggtctc |
| 4741 | caactcctaa tctcaggtga tctacccacc ttggcctccc aaattgctgg gattacaggc |
| 4801 | gtgaaccact gctcccttcc ctgtccttct gattttaaaa aaaagagaaa tgttctggca |
| 4861 | cctgcacttg cactggggac agcctatttt gctagtttgt tttgtttcgt tttgttttga |
| 4921 | tggagagcgt atgttgttta aacgcggccg cgtagataag tagcatggcg ggttaatcat |
| 4981 | taactacaag gaacccctag tgatggagtt ggccactccc tctctgcgcg ctcgctcgct |
| 5041 | cactgaggcc gggcgaccaa aggtcgcccg acgcccgggc tttgcccggg cggcctcagt |
| 5101 | gagcgagcga gcgcgcagtt aattaaggcg ccctaggccg acccttagac tctgtactca |
| 5161 | gttctataaa cgagccattg gatacgagat ccgtagattg ataagggaca cggaatatcc |
| 5221 | ccggacgcaa tagacaccgg tggacagctt ggtatcctga gcacagtcgc gcgtccgaat |
| 5281 | ctagctctac tttagaggcc ccggattctg atggtcgtag accgcagaac cgattggggg |
| 5341 | gatgagatct actagttatc agcacacaat tgcccattat acgcgcgtat aatggactat |
| 5401 | tgtgtgctga tatagggata acagggtaat tctagagcta gcatatggat ccatcgattt |
| 5461 | gatgcggtat tttctcctta cgcatctgtg cggtatttca caccgcatac gtcaaagcaa |
| 5521 | ccatagtacg cgccctgtag cggcgcatta agcgcggcgg gtgtggtggt tacgcgcagc |
| 5581 | gtgaccgcta cacttgccag cgccctagcg cccgctcctt tcgctttctt cccttccttt |
| 5641 | ctcgccacgt tcgccggctt tccccgtcaa gctctaaatc gggggctccc tttagggttc |
| 5701 | cgatttagtg ctttacggca cctcgacccc aaaaaacttg atttgggtga tggttcacgt |
| 5761 | agtgggccat cgccctgata gacggttttt cgccctttga cgttggagtc cacgttcttt |
| 5821 | aatagtggac tcttgttcca aactggaaca acactcaact ctatctcggg ctattctttt |
| 5881 | gatttataag ggattttgcc gatttcggtc tattggttaa aaaatgagct gatttaacaa |
| 5941 | aaatttaacg cgaattttaa caaaatatta acgtttacaa ttttatggtg cactctcagt |
| 6001 | acaatctgct ctgatgccgc atagttaagc cagccccgac acccgccaac acccgctgac |
| 6061 | gcgccctgac gggcttgtct gctcccggca tccgcttaca gacaagctgt gaccgtctcc |
| 6121 | gggagctgca tgtgtcagag gttttcaccg tcatcaccga aacgcgcgag acgaaagggc |
| 6181 | ctcgtgatac gcctattttt ataggttaat gtcatgataa taatggtttc ttagacgtca |
| 6241 | ggtggcactt ttcggggaaa tgtgcgcgga acccctattt gtttattttt ctaaatacat |
| 6301 | tcaaatatgt atccgctcat gagacaataa ccctgataaa tgcttcaata atattgaaaa |
| 6361 | aggaagagta tgagccatat tcaacgggaa acgtcgaggc cgcgattaaa ttccaacatg |
| 6421 | gatgctgatt tatatgggta taaatgggct cgcgataatg tcgggcaatc aggtgcgaca |
| 6481 | atctatcgct tgtatgggaa gcccgatgcg ccagagttgt ttctgaaaca tggcaaaggt |
| 6541 | agcgttgcca atgatgttac agatgagatg gtcagactaa actggctgac ggaatttatg |
| 6601 | cctcttccga ccatcaagca ttttatccgt actcctgatg atgcatggtt actcaccact |
| 6661 | gcgatccccg gaaaaacagc attccaggta ttagaagaat atcctgattc aggtgaaaat |
| 6721 | attgttgatg cgctggcagt gttcctgcgc cggttgcatt cgattcctgt ttgtaattgt |
| 6781 | ccttttaaca gcgatcgcgt atttcgtctc gctcaggcgc aatcacgaat gaataacggt |
| 6841 | ttggttgatg cgagtgattt tgatgacgag cgtaatggct ggcctgttga acaagtctgg |
| 6901 | aaagaaatgc ataaactttt gccattctca ccggattcag tcgtcactca tggtgatttc |
| 6961 | tcacttgata accttatttt tgacgagggg aaattaatag gttgtattga tgttggacga |
| 7021 | gtcggaatcg cagaccgata ccaggatctt gccatcctat ggaactgcct cggtgagttt |
| 7081 | tctccttcat tacagaaacg gctttttcaa aaatatggta ttgataatcc tgatatgaat |
| 7141 | aaattgcagt ttcatttgat gctcgatgag tttttctaag cgtataatgg tctagagcta |
| 7201 | gcatatggat ccatcgattc cattatacgc ctgtcagacc aagtttactc atatatactt |
| 7261 | tagattgatt taaaacttca tttttaattt aaaaggatct aggtgaagat cctttttgat |
| 7321 | aatctcatga ccaaaatccc ttaacgtgag ttttcgttcc actgagcgtc agaccccgta |
| 7381 | gaaaagatca aaggatcttc ttgagatcct ttttttctgc gcgtaatctg ctgcttgcaa |
| 7441 | acaaaaaaac caccgctacc agcggtggtt tgtttgccgg atcaagagct accaactctt |
| 7501 | tttccgaagg taactggctt cagcagagcg cagataccaa atactgttct tctagtgtag |
| 7561 | ccgtagttag gccaccactt caagaactct gtagcaccgc ctacatacct cgctctgcta |
| 7621 | atcctgttac cagtggctgc tgccagtggc gataagtcgt gtcttaccgg gttggactca |
| 7681 | agacgatagt taccggataa ggcgcagcgg tcgggctgaa cggggggttc gtgcacacag |
| 7741 | cccagcttgg agcgaacgac ctacaccgaa ctgagatacc tacagcgtga gctatgagaa |
| 7801 | agcgccacgc ttcccgaagg gagaaaggcg gacaggtatc cggtaagcgg cagggtcgga |
| 7861 | acaggagagc gcacgaggga gcttccaggg ggaaacgcct ggtatcttta tagtcctgtc |
| 7921 | gggtttcgcc acctctgact tgagcgtcga tttttgtgat gctcgtcagg ggggcggagc |
| 7981 | ctatggaaaa acgccagcaa cgcggccttt ttacggttcc tggccttttg ctggcctttt |
| 8041 | gctcacatgt |

| pP098_seq100_25-56 deletion (SEQ ID NO: 500) | |
|---|---|
| (SEQ ID NO: 500) | |
| 1 | tctagagcta gcatatggat ccatcgattt agggataaca gggtaattat cagcacacaa |
| 61 | ttgcccatta tacgcgcgta taatggacta ttgtgtgctg atatctgtac acttaagggc |
| 121 | tagatcttag cttacgtcac tagagggtcc acgtttagtt tttaagatcc attgatctcc |
| 181 | taaacgctgc aagattcgca acctggtata cttagcctag gcgctaggtc ctagtgcagc |
| 241 | gggacttttt ttctaaagtc gttgagagga ggagtcgtca gaccagatag ctttgatgtc |
| 301 | ctgatcggaa ggatcgttgg cccccctgca ggcagctgtt aattaactgc gcgctcgctc |
| 361 | gctcactgag gccgcccggg caaagcccgg gcgtcgggcg acctttggtc gcccggcctc |
| 421 | agtgagcgag cgagcgcgca gagagggagt ggccaactcc atcactaggg gttccttgta |
| 481 | gttaatgatt aacccgccat gctacttatc tacggcgcgc cacgcgttct aggagttaat |
| 541 | ttttaaaaag cagtcaaaag tccaagtgcc cttgcgagca tttactctct ctgtttgctc |
| 601 | tggttaataa tctcaggagc acaaacattc cttactagtt ctaggagtta atttttaaaa |
| 661 | agcagtcaaa agtccaagtg cccttgcgag catttactct ctctgtttgc tctggttaat |
| 721 | aatctcagga gcacaaacat tccttactag ttctagagcg gccgccagtg tgctggaatt |
| 781 | cggctttttt agggctggaa gctacctttg acatcatttc ctctgcgaat gcatgtataa |
| 841 | tttctacaga acctattaga aaggatcacc cagcctctgc ttttgtacaa ctttccctta |
| 901 | aaaaactgcc aatcccactg ctgtttggcc caatagtgag aactttttcc tgctgcctct |
| 961 | tggtgctttt gcctatggcc cctattctgc ctgctgaaga cactcttgcc agcatggact |
| 1021 | taaacccctc cagctctgac aatcctcttt ctcttttgtt ttacatgaag ggtctggcag |
| 1081 | ccaaagcaat cactcaaagt tcaaacctta tcattttttg ctttgttcct cttggccttg |
| 1141 | gttttgtaca tcagctttga aaataccatc ccagggttaa tgctggggtt aatttataac |
| 1201 | tgagagtgct ctagttctgc aatacaggac atgctataaa aatggaaaga tgttgctttc |
| 1261 | tgagagatca ggtggattct tgggcatttg cttaagcttg gtaccgccac catgggggtg |
| 1321 | aggcaccctc cctgttctca caggctgctg gctgtgtgtg ctctggtgtc tctggccact |
| 1381 | gctcagcagg gggccagcag gccaggcccc agggatgccc aggcccaccc tggcagaccc |
| 1441 | agggctgtgc ccacccagtg tgatgtgcct cccaacagca gatttgactg tgcccctgat |
| 1501 | aaggccatta ctcaggaaca gtgtgaggcc aggggctgct gctatatccc tgccaagcag |
| 1561 | ggcctgcagg gggcccagat ggggcagccc tggtgcttct tcccccccag ctacccctct |
| 1621 | tataagctgg agaatctgag cagctctgaa atgggctaca ctgccactct gaccaggact |
| 1681 | acccccacct tcttccccaa ggatattctg actctgaggc tggatgtgat gatggagact |
| 1741 | gagaacaggc tgcacttcac catcaaggac cctgccaaca ggaggtatga ggtgcccctg |
| 1801 | gaaactccca gggtgcactc tagggccccc agccccctgt attctgtgga gttctctgag |
| 1861 | gagccttttg gggtcattgt ccacaggcag ctggatggca gggtgctgct gaatactact |
| 1921 | gtggcccctc tgttctttgc tgaccagttc ctgcagctga gcaccagcct gccttctcag |
| 1981 | tacattactg gcctggctga gcatctgagc cccctgatgc tgagcacctc ttggaccaga |
| 2041 | atcaccctgt ggaacaggga cctggctccc actcctgggg ccaacctgta tggcagccac |
| 2101 | cccttctacc tggccctgga ggatgggggc tctgcccatg gggtgttcct gctgaacagc |
| 2161 | aatgccatgg atgtggtgct gcagccctct cctgccctgt cttggagatc tactgggggc |
| 2221 | atcctggatg tgtatatctt cctggggcct gagcccaagt ctgtggtgca gcagtacctg |
| 2281 | gatgtggtgg gctacccctt catgcccccc tactggggcc tgggcttcca cctgtgcagg |
| 2341 | tggggctact cttctactgc tatcaccagg caggtggtgg agaacatgac cagggctcac |
| 2401 | ttccctctgg atgtgcagtg gaatgacctg gactacatgg actctaggag agacttcact |
| 2461 | tttaataagg atgggttcag ggactttcct gccatggtgc aggagctgca tcaggggggc |
| 2521 | aggagatata tgatgattgt ggaccctgct atttctagct ctggccctgc tggcagctat |
| 2581 | aggccctatg atgaggggct gaggaggggg gtgttcatca ctaatgagac tggccagccc |
| 2641 | ctgattggca aggtgtggcc tggctctact gccttccctg atttcaccaa ccccactgcc |
| 2701 | ctggcctggt gggaggatat ggtggctgag tttcatgacc aggtgccctt tgatggcatg |
| 2761 | tggattgaca tgaatgagcc cagcaacttt atcaggggct ctgaagatgg ctgccccaac |
| 2821 | aatgagctgg agaacccccc ctatgtgcct ggggtggtgg ggggcaccct gcaggctgcc |
| 2881 | accatctgtg ccagcagcca ccagttcctg agcacccact ataacctgca caacctgtat |
| 2941 | ggcctgactg aggccattgc ctctcacagg gccctggtga aggctagggg gactaggccc |
| 3001 | tttgtgatca gcaggtctac ttttgctggc catggcaggt atgctgggca ctggactggg |
| 3061 | gatgtgtggt ctagctggga gcagctggcc agctctgtgc ctgagatcct gcagtttaat |
| 3121 | ctgctggggg tgcccctggt gggggctgat gtgtgtggct tcctgggcaa tacctctgag |
| 3181 | gagctgtgtg tgaggtggac tcagctgggg gctttctacc ccttcatgag aaaccacaac |
| 3241 | tctctgctga gcctgcccca ggagccctat tctttttctg agcctgccca gcaggctatg |
| 3301 | aggaaggccc tgactctgag gtatgccctg ctgccccacc tgtataccct gttccatcag |
| 3361 | gcccatgtgg ctggggagac tgtggccaga cctctgttcc tggagttccc caaggatagc |
| 3421 | tctacttgga ctgtggacca ccagctgctg tggggggagg ctctgctgat cacccctgtg |
| 3481 | ctgcaggctg ggaaggctga ggtgactggc tatttccccc tgggcacctg gtatgatctg |
| 3541 | cagactgtgc ccattgaggc cctgggctct ctgccccctc cccctgctgc ccccagggag |
| 3601 | cctgccatcc actctgaggg ccagtgggtg accctgcctg cccctctgga cactatcaat |
| 3661 | gtgcacctga gggctggcta catcatcccc ctgcagggcc ctggcctgac taccactgag |
| 3721 | tctaggcagc agcccatggc cctggctgtg gctctgacca agggggggga ggccaggggg |
| 3781 | gagctgttct gggatgatgg ggagtctctg gaggtgctgg agaggggggc ctacacccag |
| 3841 | gtgatcttcc tggctaggaa taacaccatt gtcaatgagc tggtgagggt gacctctgag |
| 3901 | ggggctggcc tgcagctgca gaaggtgact gtgctggggg tggctactgc cccccagcag |
| 3961 | gtgctgagca atggggtgcc tgtgagcaac ttcacctata gccctgacac caaggtgctg |
| 4021 | gacatctgtg tgagcctgct gatgggggag cagttcctgg tgagctggtg ctaatttaaa |
| 4081 | tctcgagccg ggcggagtgt gttagtctct ccagagggag gctggttccc cagggaagca |
| 4141 | gagcctgtgt gcgggcagca gctgtgtgcg ggcctggggg ttgttaagtg caattatttt |
| 4201 | taataaaagg ggcatttgga aaaaaaaaaa aaaggtagca gtcgacagat gaattctgca |
| 4261 | gatctgtggc ttctagctgc ccgggtggca tccctgtgac ccctccccag tgcctctcct |
| 4321 | ggccctggaa gttgccactc cagtgcccac cagccttgtc ctaataaaat taagttgcat |
| 4381 | cattttgtct gactaggtgt ccttctataa tattatgggg tggagggggg tggtatggag |
| 4441 | caaggggcaa gttgggaaga caacctgtag ggcctgcggg gtctattggg aaccaagctg |
| 4501 | gagtgcagtg gcacaatctt ggctcactgc aatctccgcc tcctgggttc aagcgattct |
| 4561 | cctgcctcag cctcccgagt tgttgggatt ccaggcatgc atgaccaggc tcagctaatt |
| 4621 | tttgtttttt tggtagagac ggggtttcac catattggcc aggctggtct ccaactccta |
| 4681 | atctcaggtg atctacccac cttggcctcc caaattgctg ggattacagg cgtgaaccac |
| 4741 | tgctcccttc cctgtccttc tgattttaaa aaaaagagaa atgttctggc acctgcactt |
| 4801 | gcactgggga cagcctattt tgctagtttg ttttgtttcg ttttgttttg atggagagcg |
| 4861 | tatgttgttt aaacgcggcc gcgtagataa gtagcatggc gggttaatca ttaactacaa |
| 4921 | ggaaccccta gtgatggagt tggccactcc ctctctgcgc gctcgctcgc tcactgaggc |
| 4981 | cgggcgacca aaggtcgccc gacgcccggg ctttgcccgg gcggcctcag tgagcgagcg |
| 5041 | agcgcgcagt taattaaggc gccctaggcc gacccttaga ctctgtactc agttctataa |
| 5101 | acgagccatt ggatacgaga tccgtagatt gataagggac acggaatatc cccggacgca |
| 5161 | atagacaccg gtggacagct tggtatcctg agcacagtcg cgcgtccgaa tctagctcta |
| 5221 | ctttagaggc cccggattct gatggtcgta gaccgcagaa ccgattgggg ggatgagatc |
| 5281 | tactagttat cagcacacaa ttgcccatta tacgcgcgta taatggacta ttgtgtgctg |
| 5341 | atatagggat aacagggtaa ttctagagct agcatatgga tccatcgatt tgatgcggta |
| 5401 | ttttctcctt acgcatctgt gcggtatttc acaccgcata cgtcaaagca accatagtac |
| 5461 | gcgccctgta gcggcgcatt aagcgcggcg ggtgtggtgg ttacgcgcag cgtgaccgct |
| 5521 | acacttgcca gcgccctagc gcccgctcct ttcgctttct tcccttcctt tctcgccacg |
| 5581 | ttcgccggct ttccccgtca agctctaaat cgggggctcc ctttagggtt ccgatttagt |
| 5641 | gctttacggc acctcgaccc caaaaaactt gatttgggtg atggttcacg tagtgggcca |
| 5701 | tcgccctgat agacggtttt tcgccctttg acgttggagt ccacgttctt taatagtgga |
| 5761 | ctcttgttcc aaactggaac aacactcaac tctatctcgg gctattcttt tgatttataa |
| 5821 | gggattttgc cgatttcggt ctattggtta aaaaatgagc tgatttaaca aaaatttaac |
| 5881 | gcgaatttta acaaaatatt aacgtttaca attttatggt gcactctcag tacaatctgc |
| 5941 | tctgatgccg catagttaag ccagccccga cacccgccaa cacccgctga cgcgccctga |
| 6001 | cgggcttgtc tgctcccggc atccgcttac agacaagctg tgaccgtctc cgggagctgc |
| 6061 | atgtgtcaga ggttttcacc gtcatcaccg aaacgcgcga gacgaaaggg cctcgtgata |
| 6121 | cgcctatttt tataggttaa tgtcatgata ataatggttt cttagacgtc aggtggcact |
| 6181 | tttcggggaa atgtgcgcgg aacccctatt tgtttatttt tctaaataca ttcaaatatg |
| 6241 | tatccgctca tgagacaata accctgataa atgcttcaat aatattgaaa aaggaagagt |
| 6301 | atgagccata ttcaacggga aacgtcgagg ccgcgattaa attccaacat ggatgctgat |
| 6361 | ttatatgggt ataaatgggc tcgcgataat gtcgggcaat caggtgcgac aatctatcgc |
| 6421 | ttgtatggga agcccgatgc gccagagttg tttctgaaac atggcaaagg tagcgttgcc |
| 6481 | aatgatgtta cagatgagat ggtcagacta aactggctga cggaatttat gcctcttccg |
| 6541 | accatcaagc attttatccg tactcctgat gatgcatggt tactcaccac tgcgatcccc |
| 6601 | ggaaaaacag cattccaggt attagaagaa tatcctgatt caggtgaaaa tattgttgat |
| 6661 | gcgctggcag tgttcctgcg ccggttgcat tcgattcctg tttgtaattg tccttttaac |
| 6721 | agcgatcgcg tatttcgtct cgctcaggcg caatcacgaa tgaataacgg tttggttgat |
| 6781 | gcgagtgatt ttgatgacga gcgtaatggc tggcctgttg aacaagtctg gaaagaaatg |
| 6841 | cataaacttt tgccattctc accggattca gtcgtcactc atggtgattt ctcacttgat |
| 6901 | aaccttattt ttgacgaggg gaaattaata ggttgtattg atgttggacg agtcggaatc |
| 6961 | gcagaccgat accaggatct tgccatccta tggaactgcc tcggtgagtt ttctccttca |
| 7021 | ttacagaaac ggctttttca aaaatatggt attgataatc ctgatatgaa taaattgcag |
| 7081 | tttcatttga tgctcgatga gtttttctaa gcgtataatg gtctagagct agcatatgga |
| 7141 | tccatcgatt ccattatacg cctgtcagac caagtttact catatatact ttagattgat |
| 7201 | ttaaaacttc atttttaatt taaaaggatc taggtgaaga tcctttttga taatctcatg |
| 7261 | accaaaatcc cttaacgtga gttttcgttc cactgagcgt cagaccccgt agaaaagatc |
| 7321 | aaaggatctt cttgagatcc tttttttctg cgcgtaatct gctgcttgca aacaaaaaaa |
| 7381 | ccaccgctac cagcggtggt ttgtttgccg gatcaagagc taccaactct ttttccgaag |
| 7441 | gtaactggct tcagcagagc gcagatacca aatactgttc ttctagtgta gccgtagtta |
| 7501 | ggccaccact tcaagaactc tgtagcaccg cctacatacc tcgctctgct aatcctgtta |
| 7561 | ccagtggctg ctgccagtgg cgataagtcg tgtcttaccg ggttggactc aagacgatag |
| 7621 | ttaccggata aggcgcagcg gtcgggctga acggggggtt cgtgcacaca gcccagcttg |
| 7681 | gagcgaacga cctacaccga actgagatac ctacagcgtg agctatgaga aagcgccacg |
| 7741 | cttcccgaag ggagaaaggc ggacaggtat ccggtaagcg gcagggtcgg aacaggagag |
| 7801 | cgcacgaggg agcttccagg gggaaacgcc tggtatcttt atagtcctgt cgggtttcgc |
| 7861 | cacctctgac ttgagcgtcg atttttgtga tgctcgtcag gggggcggag cctatggaaa |
| 7921 | aacgccagca acgcggcctt tttacggttc ctggcctttt gctggccttt tgctcacatg |
| 7981 | t |

| pP099_seq3_25-56 deletion (SEQ ID NO: 501) | |
|---|---|
| (SEQ ID NO: 501) | |
| 1 | tctagagcta gcatatggat ccatcgattt agggataaca gggtaattat cagcacacaa |
| 61 | ttgcccatta tacgcgcgta taatggacta ttgtgtgctg atatctgtac acttaagggc |
| 121 | tagatcttag cttacgtcac tagagggtcc acgtttagtt tttaagatcc attgatctcc |
| 181 | taaacgctgc aagattcgca acctggtata cttagcctag gcgctaggtc ctagtgcagc |
| 241 | gggacttttt ttctaaagtc gttgagagga ggagtcgtca gaccagatag ctttgatgtc |
| 301 | ctgatcggaa ggatcgttgg cccccctgca ggcagctgtt aattaactgc gcgctcgctc |
| 361 | gctcactgag gccgcccggg caaagcccgg gcgtcgggcg acctttggtc gcccggcctc |
| 421 | agtgagcgag cgagcgcgca gagagggagt ggccaactcc atcactaggg gttccttgta |
| 481 | gttaatgatt aacccgccat gctacttatc tacggcgcgc cacgcgttct aggagttaat |
| 541 | ttttaaaaag cagtcaaaag tccaagtgcc cttgcgagca tttactctct ctgtttgctc |
| 601 | tggttaataa tctcaggagc acaaacattc cttactagtt ctaggagtta atttttaaaa |
| 661 | agcagtcaaa agtccaagtg cccttgcgag catttactct ctctgtttgc tctggttaat |
| 721 | aatctcagga gcacaaacat tccttactag ttctagagcg gccgccagtg tgctggaatt |
| 781 | cggctttttt agggctggaa gctacctttg acatcatttc ctctgcgaat gcatgtataa |
| 841 | tttctacaga acctattaga aaggatcacc cagcctctgc ttttgtacaa ctttccctta |
| 901 | aaaaactgcc aatcccactg ctgtttggcc caatagtgag aactttttcc tgctgcctct |
| 961 | tggtgctttt gcctatggcc cctattctgc ctgctgaaga cactcttgcc agcatggact |
| 1021 | taaacccctc cagctctgac aatcctcttt ctcttttgtt ttacatgaag ggtctggcag |
| 1081 | ccaaagcaat cactcaaagt tcaaacctta tcattttttg ctttgttcct cttggccttg |
| 1141 | gttttgtaca tcagctttga aaataccatc ccagggttaa tgctggggtt aatttataac |
| 1201 | tgagagtgct ctagttctgc aatacaggac atgctataaa aatggaaaga tgttgctttc |
| 1261 | tgagagatca ggtggattct tgggcatttg cttaagcttg gtaccgccac catgggagtg |
| 1321 | agacatcctc cttgttctca tagactgctg gctgtgtgtg ctctggtgtc tctggctaca |
| 1381 | gctcagcagg gagcttctag acctggacct agagatgctc aggctcatcc tggaagacct |
| 1441 | agagctgtgc ctacacagtg tgatgtgcct cctaattcta gatttgattg tgctcctgat |
| 1501 | aaggctataa cacaggagca gtgtgaggct agaggatgtt gttatattcc tgctaagcag |
| 1561 | ggactgcagg gagctcagat gggacagcct tggtgttttt ttcctccttc ttatccttct |
| 1621 | tataagctgg agaatctgtc ttcttctgag atgggatata cagctacact gacaagaaca |
| 1681 | acacctacat tttttcctaa ggatattctg acactgagac tggatgtgat gatggagaca |
| 1741 | gagaatagac tgcattttac aattaaggat cctgctaata gaagatatga ggtgcctcta |
| 1801 | gagacaccta gagtgcattc tagagctcct tctcctctgt attctgtgga gttttctgag |
| 1861 | gagccttttg gagtgattgt gcatagacag ctggatggaa gagtgctgct gaatacaaca |
| 1921 | gtggctcctc tgttttttgc tgatcagttt ctgcagctgt ctacatctct gccttctcag |
| 1981 | tatattacag gactggctga gcatctgtct cctctgatgc tgtctacatc ttggacaaga |
| 2041 | attacactgt ggaatagaga tctggctcct acacctggag ctaatctgta tggatctcat |
| 2101 | cctttttatc tggctctgga ggatggagga tctgctcatg gagtgtttct gctgaattct |
| 2161 | aatgctatgg atgtagtgct gcagccttct cctgctctgt cttggagatc tacaggagga |
| 2221 | attctggatg tgtatatttt tctaggacct gagcctaagt ctgtggtgca gcagtatctg |
| 2281 | gatgtagtgg gatatccttt tatgcctcct tattggggac tgggatttca tctgtgtaga |
| 2341 | tggggatatt cttctacagc tattacaaga caggtggttg agaatatgac aagagctcat |
| 2401 | tttcctctgg atgtgcagtg gaatgatcta gattatatgg attctagaag agattttaca |
| 2461 | tttaataagg atggatttag agattttcct gctatggtgc aggagctgca tcagggagga |
| 2521 | agaagatata tgatgattgt ggatcctgct atttcttctt ctggacctgc tggatcttat |
| 2581 | agaccttatg atgagggact gagaagagga gtgtttatta caaatgagac aggacagcct |
| 2641 | ctgattggaa aggtgtggcc tggatctaca gcttttcctg attttacaaa tcctacagct |
| 2701 | ctggcttggt gggaggatat ggtggctgag tttcatgatc aggtgccttt tgatggaatg |
| 2761 | tggattgata tgaatgagcc ttctaatttt ataagaggat ctgaggatgg atgtcctaat |
| 2821 | aatgagctag agaatcctcc ttatgtgcct ggagtagtgg gaggaacact gcaggctgct |
| 2881 | acaatttgtg cttcttctca tcagtttctg tctacacatt ataatctgca taatctgtat |
| 2941 | ggactgacag aggctattgc ttctcataga gctctggtga aggctagagg aacaagacct |
| 3001 | tttgtgattt ctagatctac atttgctgga catggaagat atgctggaca ttggacagga |
| 3061 | gatgtatggt cttcttggga gcagctagct tcttctgtgc ctgagattct gcagtttaat |
| 3121 | ctgctaggag tgcctctggt gggagctgat gtgtgtggat ttctgggaaa tacatctgag |
| 3181 | gagctgtgtg tgagatggac acagctggga gctttttatc cttttatgag aaatcataat |
| 3241 | tctctgctgt ctctgcctca ggagccttat tctttttctg agcctgctca gcaggctatg |
| 3301 | agaaaggctc tgacactgag atatgctctg ctgcctcatc tgtatacact gtttcatcag |
| 3361 | gctcatgtgg ctggagagac agtagctaga cctctgtttc tggagtttcc taaggattct |
| 3421 | tctacatgga cagttgatca tcagctgctg tggggagagg ctctgctgat tacacctgtg |
| 3481 | ctgcaggctg gaaaggctga ggtgacagga tattttcctc tgggaacatg gtatgatctg |
| 3541 | cagacagtgc ctatagaggc tctgggatct ctgcctcctc ctcctgctgc tcctagagag |
| 3601 | cctgctattc attctgaggg acagtgggtg acactgcctg ctcctctgga tacaattaat |
| 3661 | gtgcatctga gagctggata tattattcct ctgcagggac ctggactgac aacaacagag |
| 3721 | tctagacagc agcctatggc tctggctgtg gctctgacaa agggaggaga ggctagagga |
| 3781 | gagctgtttt gggatgatgg agagtctctg gaggtgctgg agagaggagc ttatacacag |
| 3841 | gtgatttttc tggctagaaa taatacaatt gtgaatgagc tggtgagagt gacatctgag |
| 3901 | ggagctggac tgcagctgca gaaggtgaca gtgctgggag tggctacagc tcctcagcag |
| 3961 | gtgctgtcta atggagtgcc tgtgtctaat tttacatatt ctcctgatac aaaggtgctg |
| 4021 | gatatttgtg tgtctctgct gatgggagag cagtttctgg tgtcttggtg ttaatgattt |
| 4081 | aaatctcgag ccgggcggag tgtgttagtc tctccagagg gaggctggtt ccccagggaa |
| 4141 | gcagagcctg tgtgcgggca gcagctgtgt gcgggcctgg gggttgttaa gtgcaattat |
| 4201 | ttttaataaa aggggcattt ggaaaaaaaa aaaaaaggta gcagtcgaca gatgaattct |
| 4261 | gcagatctgt ggcttctagc tgcccgggtg gcatccctgt gacccctccc cagtgcctct |
| 4321 | cctggccctg gaagttgcca ctccagtgcc caccagcctt gtcctaataa aattaagttg |
| 4381 | catcattttg tctgactagg tgtccttcta taatattatg gggtggaggg gggtggtatg |
| 4441 | gagcaagggg caagttggga agacaacctg tagggcctgc ggggtctatt gggaaccaag |
| 4501 | ctggagtgca gtggcacaat cttggctcac tgcaatctcc gcctcctggg ttcaagcgat |
| 4561 | tctcctgcct cagcctcccg agttgttggg attccaggca tgcatgacca ggctcagcta |
| 4621 | atttttgttt ttttggtaga gacggggttt caccatattg gccaggctgg tctccaactc |
| 4681 | ctaatctcag gtgatctacc caccttggcc tcccaaattg ctgggattac aggcgtgaac |
| 4741 | cactgctccc ttccctgtcc ttctgatttt aaaaaaaaga gaaatgttct ggcacctgca |
| 4801 | cttgcactgg ggacagccta ttttgctagt ttgttttgtt tcgttttgtt ttgatggaga |
| 4861 | gcgtatgttg tttaaacgcg gccgcgtaga taagtagcat ggcgggttaa tcattaacta |
| 4921 | caaggaaccc ctagtgatgg agttggccac tccctctctg cgcgctcgct cgctcactga |
| 4981 | ggccgggcga ccaaaggtcg cccgacgccc gggctttgcc cgggcggcct cagtgagcga |
| 5041 | gcgagcgcgc agttaattaa ggcgccctag gccgaccctt agactctgta ctcagttcta |
| 5101 | taaacgagcc attggatacg agatccgtag attgataagg gacacggaat atccccggac |
| 5161 | gcaatagaca ccggtggaca gcttggtatc ctgagcacag tcgcgcgtcc gaatctagct |
| 5221 | ctactttaga ggccccggat tctgatggtc gtagaccgca gaaccgattg gggggatgag |
| 5281 | atctactagt tatcagcaca caattgccca ttatacgcgc gtataatgga ctattgtgtg |
| 5341 | ctgatatagg gataacaggg taattctaga gctagcatat ggatccatcg atttgatgcg |
| 5401 | gtattttctc cttacgcatc tgtgcggtat ttcacaccgc atacgtcaaa gcaaccatag |
| 5461 | tacgcgccct gtagcggcgc attaagcgcg gcgggtgtgg tggttacgcg cagcgtgacc |
| 5521 | gctacacttg ccagcgccct agcgcccgct cctttcgctt tcttcccttc ctttctcgcc |
| 5581 | acgttcgccg gctttccccg tcaagctcta aatcgggggc tccctttagg gttccgattt |
| 5641 | agtgctttac ggcacctcga ccccaaaaaa cttgatttgg gtgatggttc acgtagtggg |
| 5701 | ccatcgccct gatagacggt ttttcgccct ttgacgttgg agtccacgtt ctttaatagt |
| 5761 | ggactcttgt tccaaactgg aacaacactc aactctatct cgggctattc ttttgattta |
| 5821 | taagggattt tgccgatttc ggtctattgg ttaaaaaatg agctgattta acaaaaattt |
| 5881 | aacgcgaatt ttaacaaaat attaacgttt acaattttat ggtgcactct cagtacaatc |
| 5941 | tgctctgatg ccgcatagtt aagccagccc cgacacccgc caacacccgc tgacgcgccc |
| 6001 | tgacgggctt gtctgctccc ggcatccgct tacagacaag ctgtgaccgt ctccgggagc |
| 6061 | tgcatgtgtc agaggttttc accgtcatca ccgaaacgcg cgagacgaaa gggcctcgtg |
| 6121 | atacgcctat ttttataggt taatgtcatg ataataatgg tttcttagac gtcaggtggc |
| 6181 | acttttcggg gaaatgtgcg cggaacccct atttgtttat ttttctaaat acattcaaat |
| 6241 | atgtatccgc tcatgagaca ataaccctga taaatgcttc aataatattg aaaaaggaag |
| 6301 | agtatgagcc atattcaacg ggaaacgtcg aggccgcgat taaattccaa catggatgct |
| 6361 | gatttatatg ggtataaatg ggctcgcgat aatgtcgggc aatcaggtgc gacaatctat |
| 6421 | cgcttgtatg ggaagcccga tgcgccagag ttgtttctga aacatggcaa aggtagcgtt |
| 6481 | gccaatgatg ttacagatga gatggtcaga ctaaactggc tgacggaatt tatgcctctt |
| 6541 | ccgaccatca agcattttat ccgtactcct gatgatgcat ggttactcac cactgcgatc |
| 6601 | cccggaaaaa cagcattcca ggtattagaa gaatatcctg attcaggtga aaatattgtt |
| 6661 | gatgcgctgg cagtgttcct gcgccggttg cattcgattc ctgtttgtaa ttgtcctttt |
| 6721 | aacagcgatc gcgtatttcg tctcgctcag gcgcaatcac gaatgaataa cggtttggtt |
| 6781 | gatgcgagtg attttgatga cgagcgtaat ggctggcctg ttgaacaagt ctggaaagaa |
| 6841 | atgcataaac ttttgccatt ctcaccggat tcagtcgtca ctcatggtga tttctcactt |
| 6901 | gataacctta tttttgacga ggggaaatta ataggttgta ttgatgttgg acgagtcgga |
| 6961 | atcgcagacc gataccagga tcttgccatc ctatggaact gcctcggtga gttttctcct |
| 7021 | tcattacaga aacggctttt tcaaaaatat ggtattgata atcctgatat gaataaattg |
| 7081 | cagtttcatt tgatgctcga tgagtttttc taagcgtata atggtctaga gctagcatat |
| 7141 | ggatccatcg attccattat acgcctgtca gaccaagttt actcatatat actttagatt |
| 7201 | gatttaaaac ttcattttta atttaaaagg atctaggtga agatcctttt tgataatctc |
| 7261 | atgaccaaaa tcccttaacg tgagttttcg ttccactgag cgtcagaccc cgtagaaaag |
| 7321 | atcaaaggat cttcttgaga tccttttttt ctgcgcgtaa tctgctgctt gcaaacaaaa |
| 7381 | aaaccaccgc taccagcggt ggtttgtttg ccggatcaag agctaccaac tctttttccg |
| 7441 | aaggtaactg gcttcagcag agcgcagata ccaaatactg ttcttctagt gtagccgtag |
| 7501 | ttaggccacc acttcaagaa ctctgtagca ccgcctacat acctcgctct gctaatcctg |
| 7561 | ttaccagtgg ctgctgccag tggcgataag tcgtgtctta ccgggttgga ctcaagacga |
| 7621 | tagttaccgg ataaggcgca gcggtcgggc tgaacggggg gttcgtgcac acagcccagc |
| 7681 | ttggagcgaa cgacctacac cgaactgaga tacctacagc gtgagctatg agaaagcgcc |
| 7741 | acgcttcccg aagggagaaa ggcggacagg tatccggtaa gcggcagggt cggaacagga |
| 7801 | gagcgcacga gggagcttcc agggggaaac gcctggtatc tttatagtcc tgtcgggttt |
| 7861 | cgccacctct gacttgagcg tcgatttttg tgatgctcgt caggggggcg gagcctatgg |
| 7921 | aaaaacgcca gcaacgcggc ctttttacgg ttcctggcct tttgctggcc ttttgctcac |
| 7981 | atgt |

| pP110 (SEQ ID NO: 502) | |
|---|---|
| (SEQ ID NO: 502) | |
| 1 | ctgcgcgctc gctcgctcac tgaggccgcc cgggcaaagc ccgggcgtcg ggcgaccttt |
| 61 | ggtcgcccgg cctcagtgag cgagcgagcg cgcagagagg gagtggccaa ctccatcact |
| 121 | aggggttcct ggaggggtgg agtcgtgacg tgaattacgt catagggtta gggaggtcgg |
| 181 | ccgctctagg agttaatttt taaaaagcag tcaaaagtcc aagtgccctt gcgagcattt |
| 241 | actctctctg tttgctctgg ttaataatct caggagcaca aacattcctt actagttcta |
| 301 | ggagttaatt tttaaaaagc agtcaaaagt ccaagtgccc ttgcgagcat ttactctctc |
| 361 | tgtttgctct ggttaataat ctcaggagca caaacattcc ttactagttc tagagcggcc |
| 421 | gccagtgtgc tggaattcgg cttttttagg gctggaagct acctttgaca tcatttcctc |
| 481 | tgcgaatgca tgtataattt ctacagaacc tattagaaag gatcacccag cctctgcttt |
| 541 | tgtacaactt tcccttaaaa aactgccaat cccactgctg tttggcccaa tagtgagaac |
| 601 | tttttcctgc tgcctcttgg tgcttttgcc tatggcccct attctgcctg ctgaagacac |
| 661 | tcttgccagc atggacttaa acccctccag ctctgacaat cctctttctc ttttgtttta |
| 721 | catgaagggt ctggcagcca aagcaatcac tcaaagttca aaccttatca ttttttgctt |
| 781 | tgttcctctt ggccttggtt ttgtacatca gctttgaaaa taccatccca gggttaatgc |
| 841 | tggggttaat ttataactga gagtgctcta gttctgcaat acaggacatg ctataaaaat |
| 901 | ggaaagatgt tgctttctga gagatcagct tacatgtggt accgagctcg gatccactag |
| 961 | taacggccgc cagtgtgctg gaattcggct ttccaggcca tctccaacca tgggagtgag |
| 1021 | gcacccgccc tgctcccacc ggctcctggc cgtctgcgcc ctcgtgtcct tggcaaccgc |
| 1081 | tgcactcctg gggcagcagg gagccagcag accagggccc cgggatgccc aggcacaccc |
| 1141 | cggccgtccc agagcagtgc ccacacagtg cgacgtcccc cccaacagcc gcttcgattg |
| 1201 | cgcccctgac aaggccatca cccaggaaca gtgcgaggcc cgcggctgct gctacatccc |
| 1261 | tgcaaagcag gggctgcagg gagcccagat ggggcagccc tggtgcttct tcccacccag |
| 1321 | ctaccccagc tacaagctgg agaacctgag ctcctctgaa atgggctaca cggccaccct |
| 1381 | gacccgtacc acccccacct tcttccccaa ggacatcctg accctgcggc tggacgtgat |
| 1441 | gatggagact gagaaccgcc tccacttcac gatcaaagat ccagctaaca ggcgctacga |
| 1501 | ggtgcccttg gagaccccgc gtgtccacag ccgggcaccg tccccactct acagcgtgga |
| 1561 | gttctccgag gagcccttcg gggtgatcgt gcaccggcag ctggacggcc gcgtgctgct |
| 1621 | gaacacgacg gtggcgcccc tgttctttgc ggaccagttc cttcagctgt ccacctcgct |
| 1681 | gccctcgcag tatatcacag gcctcgccga gcacctcagt cccctgatgc tcagcaccag |
| 1741 | ctggaccagg atcaccctgt ggaaccggga ccttgcgccc acgcccggtg cgaacctcta |
| 1801 | cgggtctcac cctttctacc tggcgctgga ggacggcggg tcggcacacg gggtgttcct |
| 1861 | gctaaacagc aatgccatgg atgtggtcct gcagccgagc cctgccctta gctggaggtc |
| 1921 | gacaggtggg atcctggatg tctacatctt cctgggccca gagcccaaga gcgtggtgca |
| 1981 | gcagtacctg gacgttgtgg gatacccgtt catgccgcca tactggggcc tgggcttcca |
| 2041 | cctgtgccgc tggggctact cctccaccgc tatcacccgc caggtggtgg agaacatgac |
| 2101 | cagggcccac ttccccctgg acgtccaatg gaacgacctg gactacatgg actcccggag |
| 2161 | ggacttcacg ttcaacaagg atggcttccg ggacttcccg gccatggtgc aggagctgca |
| 2221 | ccagggcggc cggcgctaca tgatgatcgt ggatcctgcc atcagcagct cgggccctgc |
| 2281 | cgggagctac aggccctacg acgagggtct gcggaggggg gttttcatca ccaacgagac |
| 2341 | cggccagccg ctgattggga aggtatggcc cgggtccact gccttccccg acttcaccaa |
| 2401 | ccccacagcc ctggcctggt gggaggacat ggtggctgag ttccatgacc aggtgccctt |
| 2461 | cgacggcatg tggattgaca tgaacgagcc ttccaacttc atcagaggct ctgaggacgg |
| 2521 | ctgccccaac aatgagctgg agaacccacc ctacgtgcct ggggtggttg gggggaccct |
| 2581 | ccaggcggcc accatctgtg cctccagcca ccagtttctc tccacacact acaacctgca |
| 2641 | caacctctac ggcctgaccg aagccatcgc ctcccacagg gcgctggtga aggctcgggg |
| 2701 | gacacgccca tttgtgatct cccgctcgac ctttgctggc cacggccgat acgccggcca |
| 2761 | ctggacgggg gacgtgtgga gctcctggga gcagctcgcc tcctccgtgc cagaaatcct |
| 2821 | gcagtttaac ctgctggggg tgcctctggt cggggccgac gtctgcggct tcctgggcaa |
| 2881 | cacctcagag gagctgtgtg tgcgctggac ccagctgggg gccttctacc ccttcatgcg |
| 2941 | gaaccacaac agcctgctca gtctgcccca ggagccgtac agcttcagcg agccggccca |
| 3001 | gcaggccatg aggaaggccc tcaccctgcg ctacgcactc ctcccccacc tctacacact |
| 3061 | gttccaccag gcccacgtcg cgggggagac cgtggcccgg cccctcttcc tggagttccc |
| 3121 | caaggactct agcacctgga ctgtggacca ccagctcctg tggggggagg ccctgctcat |
| 3181 | caccccagtg ctccaggccg ggaaggccga agtgactggc tacttcccct tgggcacatg |
| 3241 | gtacgacctg cagacggtgc caatagaggc ccttggcagc ctcccacccc cacctgcagc |
| 3301 | tccccgtgag ccagccatcc acagcgaggg gcagtgggtg acgctgccgg cccccctgga |
| 3361 | caccatcaac gtccacctcc gggctgggta catcatcccc ctgcagggcc ctggcctcac |
| 3421 | aaccacagag tcccgccagc agcccatggc cctggctgtg gccctgacca agggtggaga |
| 3481 | ggcccgaggg gagctgttct gggacgatgg agagagcctg gaagtgctgg agcgaggggc |
| 3541 | ctacacacag gtcatcttcc tggccaggaa taacacgatc gtgaatgagc tggtacgtgt |
| 3601 | gaccagtgag ggagctggcc tgcagctgca gaaggtgact gtcctgggcg tggccacggc |
| 3661 | gccccagcag gtcctctcca acggtgtccc tgtctccaac ttcacctaca gccccgacac |
| 3721 | caaggtcctg gacatctgtg tctcgctgtt gatgggagag cagtttctcg tcagctggtg |
| 3781 | ttagccgggc ggagtgtgtt agtctctcca gagggaggct ggttccccag ggaagcagag |
| 3841 | cctgtgtgcg ggcagcagct gtgtgcgggc ctgggggttg ttaagtgcaa ttatttttaa |
| 3901 | taaaaggggc atttggaaaa aaaaaaaaaa ggtagcagtc gacagatgaa ttctgcagat |
| 3961 | ctgtggcttc tagctgcccg ggtggcatcc ctgtgacccc tccccagtgc ctctcctggc |
| 4021 | cctggaagtt gccactccag tgcccaccag ccttgtccta ataaaattaa gttgcatcat |
| 4081 | tttgtctgac taggtgtcct tctataatat tatggggtgg aggggggtgg tatggagcaa |
| 4141 | ggggcaagtt gggaagacaa cctgagttgt tgggattcca ggcatcgagt agataagtag |
| 4201 | catggcgggt taatcattaa ctacaaggaa cccctagtga tggagttggc cactccctct |
| 4261 | ctgcgcgctc gctcgctcac tgaggccggg cgaccaaagg tcgcccgacg cccgggcttt |
| 4321 | gcccgggcgg cctcagtgag cgagcgagcg cgcagagagg gacagatccg aagccgggca |
| 4381 | aatcagcgcc tggcagcagt ggcgtctggc ggaaaacctc agtgtgacgc tccccgccgc |
| 4441 | gtcccacgct tgttcccgga tctgaccacc agcgaaatcc gatttttgca ccgagctggg |
| 4501 | taataagcgt tggcaattta accgccagtc aggctttctt tcacagtgtg gattggcgat |
| 4561 | aaaaaacaac tgctgacgcc gctgcgcgat cagttcaccc gttcaccgct ggataacgac |
| 4621 | ttggcgtaag tgaagcgacc cgtaagaccc taacgcctgg gtcgaacgct ggaaggcggc |
| 4681 | gggccaaacc aggccgaagc agcgttgttg cagttcacgg cagatacact tgctgttgcg |
| 4741 | gtgctgatta cgaccgctca ctcgtggcag caacagggga aaaccttatt tatcagccgg |
| 4801 | aaaacctacc ggattgttgg tagtggtcaa taggcgatta ccgttgtgtt gaagtggcga |
| 4861 | gcgatacacc gcttccggcg cggattggcc tgaactgcca actggcgcag gtagcagagc |
| 4921 | gggtaaactg gctcggatta gggccgcaag aaaactatcc cgaccgcctt actgccgcct |
| 4981 | gttttgaccg ctgggatctg ccaagtcaga cagtatagcc cgtacgtctt cccgagcgaa |
| 5041 | aacggtctgc gctgcgggac gcgcgaattg aatttggccc acaccagtgg cgcggcgact |
| 5101 | tccagttcaa tatcagccgc tacagtgaac agcaactgtt ggaaaccagc cttcgccaac |
| 5161 | tgctgcacgc ggaagaaggc actggctgaa tatcgacggt ttccagttgg ggattggtgg |
| 5221 | cgacgactcc tggagcccgt cagtatcggc ggacttccaa ctgagcgccg gtcgctacct |
| 5281 | taccagttgg tctggtgtca aaaagcgtcc gcttgagtct agcgatcgcg cgcagatctg |
| 5341 | tcatgtgagc aaaaggccag caaaaggcca ggaaccgtaa aaaggccgcg ttgctggcgt |
| 5401 | ttttccatag gctccgcccc cctgacgagc atcacaaaaa tcgacgctca agtcagaggt |
| 5461 | ggcgaaaccc gacaggacta taaagatacc aggcgtttcc ccctggaagc tccctcgtgc |
| 5521 | gctctcctgt tccgaccctg ccgcttaccg gatacctgtc cgcctttctc ccttcgggaa |
| 5581 | gcgtggcgct ttctcatagc tcacgctgta ggtatctcag ttcggtgtag gtcgttcgct |
| 5641 | ccaagctggg ctgtgtgcac gaaccccccg ttcagcccga ccgctgcgcc ttatccggta |
| 5701 | actatcgtct tgagtccaac ccggtaagac acgacttatc gccactggca gcagccactg |
| 5761 | gtaacaggat tagcagagcg aggtatgtag gcggtgctac agagttcttg aagtggtggc |
| 5821 | ctaactacgg ctacactaga agaacagtat ttggtatctg cgctctgctg aagccagtta |
| 5881 | ccttcggaaa aagagttggt agctcttgat ccggcaaaca aaccaccgct ggtagcggtg |
| 5941 | gtttttttgt ttgcaagcag cagattacgc gcagaaaaaa aggatctcaa gaagatcctt |
| 6001 | tgatcttttc tacggggtct gacgctcagt ggaacgaaaa ctcacgttaa gggattttgg |
| 6061 | tcatgagatt atcaaaaagg atcttcacct agatcctttt cacgtagaaa gccagtccgc |
| 6121 | agaaacggtg ctgaccccgg atgaatgtca gctactgggc tatctggaca agggaaaacg |
| 6181 | caagcgcaaa gagaaagcag gtagcttgca gtgggcttac atggcgatag ctagactggg |
| 6241 | cggttttatg gacagcaagc gaaccggaat tgccagctgg ggcgccctct ggtaaggttg |
| 6301 | ggaagccctg caaagtaaac tggatggctt tcttgccgcc aaggatctga tggcgcaggg |
| 6361 | gatcaagatc tgatcaagag acaggatgag gatcgtttcg catgattgaa caagatggat |
| 6421 | tgcacgcagg ttctccggcc gcttgggtgg agaggctatt cggctatgac tgggcacaac |
| 6481 | agacaatcgg ctgctctgat gccgccgtgt tccggctgtc agcgcagggg cgcccggttc |
| 6541 | tttttgtcaa gaccgacctg tccggtgccc tgaatgaact gcaagacgag gcagcgcggc |
| 6601 | tatcgtggct ggccacgacg ggcgttcctt gcgcagctgt gctcgacgtt gtcactgaag |
| 6661 | cgggaaggga ctggctgcta ttgggcgaag tgccggggca ggatctcctg tcatctcacc |
| 6721 | ttgctcctgc cgagaaagta tccatcatgg ctgatgcaat gcggcggctg catacgcttg |
| 6781 | atccggctac ctgcccattc gaccaccaag cgaaacatcg catcgagcga gcacgtactc |
| 6841 | ggatggaagc cggtcttgtc gatcaggatg atctggacga agagcatcag gggctcgcgc |
| 6901 | cagccgaact gttcgccagg ctcaaggcga gcatgcccga cggcgaggat ctcgtcgtga |
| 6961 | cccatggcga tgcctgcttg ccgaatatca tggtggaaaa tggccgcttt tctggattca |
| 7021 | tcgactgtgg ccggctgggt gtggcggacc gctatcagga catagcgttg gctacccgtg |
| 7081 | atattgctga agagcttggc ggcgaatggg ctgaccgctt cctcgtgctt tacggtatcg |
| 7141 | ccgctcccga ttcgcagcgc atcgccttct atcgccttct tgacgagttc ttctgaattt |
| 7201 | aaagcccaat acgcaaaccg cctctccccg cgcgttggcc gaagcggttc aatattttgt |
| 7261 | taaaattcgc gttaaatttt tgttaaatca gctatttttt aaccaatagg ccgaaatcgg |
| 7321 | caaaatccct tgtaaatcaa aagaatagac cgagataggg ttgagtgttg ttccagtttg |
| 7381 | gaacaagagt ccactattaa agaacgtgga ctccaacgtc aaagggcgaa aaaccgtcta |
| 7441 | tcagggcgtt ggcccactac gtgaaccttc accctaatca agttttttgg ggtcgaggtg |
| 7501 | ccgtaaagca ctaaatcgga accctaaagg gagcccccga tttagagctt gacggggaaa |
| 7561 | ccggcgaacg tggcgagaaa ggaagggaag aaagcgaaag gagcgggcgc tagggcgctg |
| 7621 | gcaagtgtag cggtcacgct gcgcgtaacc accacacccg ccgcgctaag cgccgctaca |
| 7681 | gggcgcgtcc cttcgccttc aggctgcgtc gagtactgta ctgtgagcca gagttgcccg |
| 7741 | gcgctctccg gctgcggtag ttcaggcagt tcaatcaact gtttaccttg tggagcgact |
| 7801 | ccagaggcac ttcaccgctt gccagcggct tacgatccag cgccacgatc cagtgcagga |
| 7861 | gatcgttatc gctatacgga acaggtattc gctggtcact tcgataaggt ttgcccggat |
| 7921 | aaacggaact ggaaaaactg ctgctggtgt tttgcttccg tcagtgctgg atcggcgtgc |
| 7981 | ggtcggcaaa gaccagaccg ttctaacaga actggcgatt gttcggcgta tcgccaaaat |
| 8041 | caccgccgta agccgaccac gggttgccgt tttcagcagg atttaatcag cgactgatcc |
| 8101 | acccagtccc agacgaagcc gccctgtaaa cggggatact gacgaaacgc ctgccagtat |
| 8161 | ttagcgaaac cgccaagact gttacccaag cgtgggcgta ttcgcaaagg atcagcgggc |
| 8221 | gcgtctctcc aggtagcgaa agcctttttt gatcgacctt tcggcacagc cgggaagggc |
| 8281 | tggtcttcaa ccacgcgcgc gtacaacggg caaataatat cggtggccgt ggtgtcggct |
| 8341 | ccgccgcctt caactgcacc gggcgggaag gatcgacaga tttgatccag cgatacagcg |
| 8401 | cgtcgtgatt agcgccgtgg cctgattcaa ttccccagcg accagtagat cacactcggg |
| 8461 | tgattacgat tgcgctgcac cagtcgcgtt acggttcgct cttcgccggt agccagcgcg |
| 8521 | gatcacggtc agacgattcg ttggcacgat ccgtgggttt caatactggc ttcaaaccac |
| 8581 | cactaacagg ccgtagcggt cgcacagcgt gtaccacagc ggttggttcg gataatcgaa |
| 8641 | cagcgcacgg cgttaaagtt gttctgcttc aacagcagga tattctgcac cttcgtctgc |
| 8701 | tcttcctaac ctgaccaagc agaggatctg ctcgtgacgg ttaatcctcg aatcagcaac |
| 8761 | ggcttgccgt tcagcagcag cagaccaagt tcaatccgca cctcgcggaa accgacaacg |
| 8821 | caggcttctg cttcaatcag cgtgccgtcg gcggtgtgca gttcaaccac cgcacgatag |
| 8881 | agattcggga tttcggcgct ccacagtttc gggttttcga cgttcagacg tagtgtgacg |
| 8941 | cgatctgcaa accaccacgc tcaacgataa tttcaccgcc gaaaggcgcg gtgccgctgg |
| 9001 | cgacctgcgt ttcaccctgc cagaaagaaa ctgttacccg taggtagtca cgcaactcgc |
| 9061 | cgcacactga acttcagcct ccagtacagc gcggctgaaa tcgtcttaaa gcgagtggca |
| 9121 | actggaaatc gctgatttgt gtagtcggtt tagcagcaac gagacttcac ggaaaatccg |
| 9181 | ctaatccgcc acagatcctg atcttccaga taactgccgt cactccaacg cagcaccttc |
| 9241 | accgcgaggc ggttttctcc ggcgcgtaaa aatcgctcag gtcaaattca gacggcaaac |
| 9301 | gactgtcctg gccgtaaccg acccagcgcc cgttgcacca cagattgaaa cgccgagttt |
| 9361 | acgcctcaaa aataattcgc gtctggcctt cctgtagcca gctttcacaa ctataatagt |
| 9421 | gagcgagtaa caacccgtcg gattctccgt gggaacaaac ggcggattga ccgtataggg |
| 9481 | ataggttacg ttggtgtagt agggcgctcc gtaaccgtgc tactgccagt ttgaggggac |
| 9541 | gacgacagta tcggcctcag gaagatcgca ctccagccag ctttccggca ccgcttctgg |
| 9601 | tactggaaac caggcaaagc gcctatcgcc tatcaggctg cacaactgtt gggaagggcg |
| 9661 | atctgtgcgg gcctcttcgc tattacgcca gcttgcgaaa gggggtagtg ctgcaaggcg |
| 9721 | attaagttgg gtaacgccag ggttttccca gtcacgacgt ggatctgggc cactccctct |

| pP111 (SEQ ID NO: 503) | |
|---|---|
| (SEQ ID NO: 503) | |
| 1 | ctgcgcgctc gctcgctcac tgaggccgcc cgggcaaagc ccgggcgtcg ggcgaccttt |
| 61 | ggtcgcccgg cctcagtgag cgagcgagcg cgcagagagg gagtggccaa ctccatcact |
| 121 | aggggttcct ggaggggtgg agtcgtgacg tgaattacgt catagggtta gggaggtcgg |
| 181 | ccgctctagg agttaatttt taaaaagcag tcaaaagtcc aagtgccctt gcgagcattt |
| 241 | actctctctg tttgctctgg ttaataatct caggagcaca aacattcctt actagttcta |
| 301 | ggagttaatt tttaaaaagc agtcaaaagt ccaagtgccc ttgcgagcat ttactctctc |
| 361 | tgtttgctct ggttaataat ctcaggagca caaacattcc ttactagttc tagagcggcc |
| 421 | gccagtgtgc tggaattcgg cttttttagg gctggaagct acctttgaca tcatttcctc |
| 481 | tgcgaatgca tgtataattt ctacagaacc tattagaaag gatcacccag cctctgcttt |
| 541 | tgtacaactt tcccttaaaa aactgccaat cccactgctg tttggcccaa tagtgagaac |
| 601 | tttttcctgc tgcctcttgg tgcttttgcc tatggcccct attctgcctg ctgaagacac |
| 661 | tcttgccagc atggacttaa acccctccag ctctgacaat cctctttctc ttttgtttta |
| 721 | catgaagggt ctggcagcca aagcaatcac tcaaagttca aaccttatca ttttttgctt |
| 781 | tgttcctctt ggccttggtt ttgtacatca gctttgaaaa taccatccca gggttaatgc |
| 841 | tggggttaat ttataactga gagtgctcta gttctgcaat acaggacatg ctataaaaat |
| 901 | ggaaagatgt tgctttctga gagatcagct tacatgtggt accgagctcg gatccactag |
| 961 | taacggccgc cagtgtgctg gaattcggct ttccaggcca tctccaacca tgggagtgag |
| 1021 | gcacccgccc tgctcccacc ggctcctggc cgtctgcgcc ctcgtgtcct tggcaaccgc |
| 1081 | tcagcaggga gccagcagac cagggccccg ggatgcccag gcacaccccg gccgtcccag |
| 1141 | agcagtgccc acacagtgcg acgtcccccc caacagccgc ttcgattgcg cccctgacaa |
| 1201 | ggccatcacc caggaacagt gcgaggcccg cggctgctgc tacatccctg caaagcaggg |
| 1261 | gctgcaggga gcccagatgg ggcagccctg gtgcttcttc ccacccagct accccagcta |
| 1321 | caagctggag aacctgagct cctctgaaat gggctacacg gccaccctga cccgtaccac |
| 1381 | ccccaccttc ttccccaagg acatcctgac cctgcggctg gacgtgatga tggagactga |
| 1441 | gaaccgcctc cacttcacga tcaaagatcc agctaacagg cgctacgagg tgcccttgga |
| 1501 | gaccccgcgt gtccacagcc gggcaccgtc cccactctac agcgtggagt tctccgagga |
| 1561 | gcccttcggg gtgatcgtgc accggcagct ggacggccgc gtgctgctga acacgacggt |
| 1621 | ggcgcccctg ttctttgcgg accagttcct tcagctgtcc acctcgctgc cctcgcagta |
| 1681 | tatcacaggc ctcgccgagc acctcagtcc cctgatgctc agcaccagct ggaccaggat |
| 1741 | caccctgtgg aaccgggacc ttgcgcccac gcccggtgcg aacctctacg ggtctcaccc |
| 1801 | tttctacctg gcgctggagg acggcgggtc ggcacacggg gtgttcctgc taaacagcaa |
| 1861 | tgccatggat gtggtcctgc agccgagccc tgcccttagc tggaggtcga caggtgggat |
| 1921 | cctggatgtc tacatcttcc tgggcccaga gcccaagagc gtggtgcagc agtacctgga |
| 1981 | cgttgtggga tacccgttca tgccgccata ctggggcctg ggcttccacc tgtgccgctg |
| 2041 | gggctactcc tccaccgcta tcacccgcca ggtggtggag aacatgacca gggcccactt |
| 2101 | ccccctggac gtccaatgga acgacctgga ctacatggac tcccggaggg acttcacgtt |
| 2161 | caacaaggat ggcttccggg acttcccggc catggtgcag gagctgcacc agggcggccg |
| 2221 | gcgctacatg atgatcgtgg atcctgccat cagcagctcg ggccctgccg ggagctacag |
| 2281 | gccctacgac gagggtctgc ggaggggggt tttcatcacc aacgagaccg gccagccgct |
| 2341 | gattgggaag gtatggcccg ggtccactgc cttccccgac ttcaccaacc ccacagccct |
| 2401 | ggcctggtgg gaggacatgg tggctgagtt ccatgaccag gtgcccttcg acggcatgtg |
| 2461 | gattgacatg aacgagcctt ccaacttcat cagaggctct gaggacggct gccccaacaa |
| 2521 | tgagctggag aacccaccct acgtgcctgg ggtggttggg gggaccctcc aggcggccac |
| 2581 | catctgtgcc tccagccacc agtttctctc cacacactac aacctgcaca acctctacgg |
| 2641 | cctgaccgaa gccatcgcct cccacagggc gctggtgaag gctcggggga cacgcccatt |
| 2701 | tgtgatctcc cgctcgacct ttgctggcca cggccgatac gccggccact ggacggggga |
| 2761 | cgtgtggagc tcctgggagc agctcgcctc ctccgtgcca gaaatcctgc agtttaacct |
| 2821 | gctgggggtg cctctggtcg gggccgacgt ctgcggcttc ctgggcaaca cctcagagga |
| 2881 | gctgtgtgtg cgctggaccc agctgggggc cttctacccc ttcatgcgga accacaacag |
| 2941 | cctgctcagt ctgccccagg agccgtacag cttcagcgag ccggcccagc aggccatgag |
| 3001 | gaaggccctc accctgcgct acgcactcct cccccacctc tacacactgt tccaccaggc |
| 3061 | ccacgtcgcg ggggagaccg tggcccggcc cctcttcctg gagttcccca aggactctag |
| 3121 | cacctggact gtggaccacc agctcctgtg gggggaggcc ctgctcatca ccccagtgct |
| 3181 | ccaggccggg aaggccgaag tgactggcta cttccccttg ggcacatggt acgacctgca |
| 3241 | gacggtgcca atagaggccc ttggcagcct cccaccccca cctgcagctc cccgtgagcc |
| 3301 | agccatccac agcgaggggc agtgggtgac gctgccggcc cccctggaca ccatcaacgt |
| 3361 | ccacctccgg gctgggtaca tcatccccct gcagggccct ggcctcacaa ccacagagtc |
| 3421 | ccgccagcag cccatggccc tggctgtggc cctgaccaag ggtggagagg cccgagggga |
| 3481 | gctgttctgg gacgatggag agagcctgga agtgctggag cgaggggcct acacacaggt |
| 3541 | catcttcctg gccaggaata acacgatcgt gaatgagctg gtacgtgtga ccagtgaggg |
| 3601 | agctggcctg cagctgcaga aggtgactgt cctgggcgtg gccacggcgc cccagcaggt |
| 3661 | cctctccaac ggtgtccctg tctccaactt cacctacagc cccgacacca aggtcctgga |
| 3721 | catctgtgtc tcgctgttga tgggagagca gtttctcgtc agctggtgtt agccgggcgg |
| 3781 | agtgtgttag tctctccaga gggaggctgg ttccccaggg aagcagagcc tgtgtgcggg |
| 3841 | cagcagctgt gtgcgggcct gggggttgtt aagtgcaatt atttttaata aaaggggcat |
| 3901 | ttggaaaaaa aaaaaaaagg tagcagtcga cagatgaatt ctgcagatct gtggcttcta |
| 3961 | gctgcccggg tggcatccct gtgacccctc cccagtgcct ctcctggccc tggaagttgc |
| 4021 | cactccagtg cccaccagcc ttgtcctaat aaaattaagt tgcatcattt tgtctgacta |
| 4081 | ggtgtccttc tataatatta tggggtggag gggggtggta tggagcaagg ggcaagttgg |
| 4141 | gaagacaacc tgagttgttg ggattccagg catcgagtag ataagtagca tggcgggtta |
| 4201 | atcattaact acaaggaacc cctagtgatg gagttggcca ctccctctct gcgcgctcgc |
| 4261 | tcgctcactg aggccgggcg accaaaggtc gcccgacgcc cgggctttgc ccgggcggcc |
| 4321 | tcagtgagcg agcgagcgcg cagagaggga cagatccgaa gccgggcaaa tcagcgcctg |
| 4381 | gcagcagtgg cgtctggcgg aaaacctcag tgtgacgctc cccgccgcgt cccacgcttg |
| 4441 | ttcccggatc tgaccaccag cgaaatccga tttttgcacc gagctgggta ataagcgttg |
| 4501 | gcaatttaac cgccagtcag gctttctttc acagtgtgga ttggcgataa aaaacaactg |
| 4561 | ctgacgccgc tgcgcgatca gttcacccgt tcaccgctgg ataacgactt ggcgtaagtg |
| 4621 | aagcgacccg taagacccta acgcctgggt cgaacgctgg aaggcggcgg gccaaaccag |
| 4681 | gccgaagcag cgttgttgca gttcacggca gatacacttg ctgttgcggt gctgattacg |
| 4741 | accgctcact cgtggcagca acaggggaaa accttattta tcagccggaa aacctaccgg |
| 4801 | attgttggta gtggtcaata ggcgattacc gttgtgttga agtggcgagc gatacaccgc |
| 4861 | ttccggcgcg gattggcctg aactgccaac tggcgcaggt agcagagcgg gtaaactggc |
| 4921 | tcggattagg gccgcaagaa aactatcccg accgccttac tgccgcctgt tttgaccgct |
| 4981 | gggatctgcc aagtcagaca gtatagcccg tacgtcttcc cgagcgaaaa cggtctgcgc |
| 5041 | tgcgggacgc gcgaattgaa tttggcccac accagtggcg cggcgacttc cagttcaata |
| 5101 | tcagccgcta cagtgaacag caactgttgg aaaccagcct tcgccaactg ctgcacgcgg |
| 5161 | aagaaggcac tggctgaata tcgacggttt ccagttgggg attggtggcg acgactcctg |
| 5221 | gagcccgtca gtatcggcgg acttccaact gagcgccggt cgctacctta ccagttggtc |
| 5281 | tggtgtcaaa aagcgtccgc ttgagtctag cgatcgcgcg cagatctgtc atgtgagcaa |
| 5341 | aaggccagca aaaggccagg aaccgtaaaa aggccgcgtt gctggcgttt ttccataggc |
| 5401 | tccgcccccc tgacgagcat cacaaaaatc gacgctcaag tcagaggtgg cgaaacccga |
| 5461 | caggactata aagataccag gcgtttcccc ctggaagctc cctcgtgcgc tctcctgttc |
| 5521 | cgaccctgcc gcttaccgga tacctgtccg cctttctccc ttcgggaagc gtggcgcttt |
| 5581 | ctcatagctc acgctgtagg tatctcagtt cggtgtaggt cgttcgctcc aagctgggct |
| 5641 | gtgtgcacga accccccgtt cagcccgacc gctgcgcctt atccggtaac tatcgtcttg |
| 5701 | agtccaaccc ggtaagacac gacttatcgc cactggcagc agccactggt aacaggatta |
| 5761 | gcagagcgag gtatgtaggc ggtgctacag agttcttgaa gtggtggcct aactacggct |
| 5821 | acactagaag aacagtattt ggtatctgcg ctctgctgaa gccagttacc ttcggaaaaa |
| 5881 | gagttggtag ctcttgatcc ggcaaacaaa ccaccgctgg tagcggtggt ttttttgttt |
| 5941 | gcaagcagca gattacgcgc agaaaaaaag gatctcaaga agatcctttg atcttttcta |
| 6001 | cggggtctga cgctcagtgg aacgaaaact cacgttaagg gattttggtc atgagattat |
| 6061 | caaaaaggat cttcacctag atccttttca cgtagaaagc cagtccgcag aaacggtgct |
| 6121 | gaccccggat gaatgtcagc tactgggcta tctggacaag ggaaaacgca agcgcaaaga |
| 6181 | gaaagcaggt agcttgcagt gggcttacat ggcgatagct agactgggcg gttttatgga |
| 6241 | cagcaagcga accggaattg ccagctgggg cgccctctgg taaggttggg aagccctgca |
| 6301 | aagtaaactg gatggctttc ttgccgccaa ggatctgatg gcgcagggga tcaagatctg |
| 6361 | atcaagagac aggatgagga tcgtttcgca tgattgaaca agatggattg cacgcaggtt |
| 6421 | ctccggccgc ttgggtggag aggctattcg gctatgactg ggcacaacag acaatcggct |
| 6481 | gctctgatgc cgccgtgttc cggctgtcag cgcaggggcg cccggttctt tttgtcaaga |
| 6541 | ccgacctgtc cggtgccctg aatgaactgc aagacgaggc agcgcggcta tcgtggctgg |
| 6601 | ccacgacggg cgttccttgc gcagctgtgc tcgacgttgt cactgaagcg ggaagggact |
| 6661 | ggctgctatt gggcgaagtg ccggggcagg atctcctgtc atctcacctt gctcctgccg |
| 6721 | agaaagtatc catcatggct gatgcaatgc ggcggctgca tacgcttgat ccggctacct |
| 6781 | gcccattcga ccaccaagcg aaacatcgca tcgagcgagc acgtactcgg atggaagccg |
| 6841 | gtcttgtcga tcaggatgat ctggacgaag agcatcaggg gctcgcgcca gccgaactgt |
| 6901 | tcgccaggct caaggcgagc atgcccgacg gcgaggatct cgtcgtgacc catggcgatg |
| 6961 | cctgcttgcc gaatatcatg gtggaaaatg gccgcttttc tggattcatc gactgtggcc |
| 7021 | ggctgggtgt ggcggaccgc tatcaggaca tagcgttggc tacccgtgat attgctgaag |
| 7081 | agcttggcgg cgaatgggct gaccgcttcc tcgtgcttta cggtatcgcc gctcccgatt |
| 7141 | cgcagcgcat cgccttctat cgccttcttg acgagttctt ctgaatttaa agcccaatac |
| 7201 | gcaaaccgcc tctccccgcg cgttggccga agcggttcaa tattttgtta aaattcgcgt |
| 7261 | taaatttttg ttaaatcagc tattttttaa ccaataggcc gaaatcggca aaatcccttg |
| 7321 | taaatcaaaa gaatagaccg agatagggtt gagtgttgtt ccagtttgga acaagagtcc |
| 7381 | actattaaag aacgtggact ccaacgtcaa agggcgaaaa accgtctatc agggcgttgg |
| 7441 | cccactacgt gaaccttcac cctaatcaag ttttttgggg tcgaggtgcc gtaaagcact |
| 7501 | aaatcggaac cctaaaggga gcccccgatt tagagcttga cggggaaacc ggcgaacgtg |
| 7561 | gcgagaaagg aagggaagaa agcgaaagga gcgggcgcta gggcgctggc aagtgtagcg |
| 7621 | gtcacgctgc gcgtaaccac cacacccgcc gcgctaagcg ccgctacagg gcgcgtccct |
| 7681 | tcgccttcag gctgcgtcga gtactgtact gtgagccaga gttgcccggc gctctccggc |
| 7741 | tgcggtagtt caggcagttc aatcaactgt ttaccttgtg gagcgactcc agaggcactt |
| 7801 | caccgcttgc cagcggctta cgatccagcg ccacgatcca gtgcaggaga tcgttatcgc |
| 7861 | tatacggaac aggtattcgc tggtcacttc gataaggttt gcccggataa acggaactgg |
| 7921 | aaaaactgct gctggtgttt tgcttccgtc agtgctggat cggcgtgcgg tcggcaaaga |
| 7981 | ccagaccgtt ctaacagaac tggcgattgt tcggcgtatc gccaaaatca ccgccgtaag |
| 8041 | ccgaccacgg gttgccgttt tcagcaggat ttaatcagcg actgatccac ccagtcccag |
| 8101 | acgaagccgc cctgtaaacg gggatactga cgaaacgcct gccagtattt agcgaaaccg |
| 8161 | ccaagactgt tacccaagcg tgggcgtatt cgcaaaggat cagcgggcgc gtctctccag |
| 8221 | gtagcgaaag ccttttttga tcgacctttc ggcacagccg ggaagggctg gtcttcaacc |
| 8281 | acgcgcgcgt acaacgggca aataatatcg gtggccgtgg tgtcggctcc gccgccttca |
| 8341 | actgcaccgg gcgggaagga tcgacagatt tgatccagcg atacagcgcg tcgtgattag |
| 8401 | cgccgtggcc tgattcaatt ccccagcgac cagtagatca cactcgggtg attacgattg |
| 8461 | cgctgcacca gtcgcgttac ggttcgctct tcgccggtag ccagcgcgga tcacggtcag |
| 8521 | acgattcgtt ggcacgatcc gtgggtttca atactggctt caaaccacca ctaacaggcc |
| 8581 | gtagcggtcg cacagcgtgt accacagcgg ttggttcgga taatcgaaca gcgcacggcg |
| 8641 | ttaaagttgt tctgcttcaa cagcaggata ttctgcacct tcgtctgctc ttcctaacct |
| 8701 | gaccaagcag aggatctgct cgtgacggtt aatcctcgaa tcagcaacgg cttgccgttc |
| 8761 | agcagcagca gaccaagttc aatccgcacc tcgcggaaac cgacaacgca ggcttctgct |
| 8821 | tcaatcagcg tgccgtcggc ggtgtgcagt tcaaccaccg cacgatagag attcgggatt |
| 8881 | tcggcgctcc acagtttcgg gttttcgacg ttcagacgta gtgtgacgcg atctgcaaac |
| 8941 | caccacgctc aacgataatt tcaccgccga aaggcgcggt gccgctggcg acctgcgttt |
| 9001 | caccctgcca gaaagaaact gttacccgta ggtagtcacg caactcgccg cacactgaac |
| 9061 | ttcagcctcc agtacagcgc ggctgaaatc gtcttaaagc gagtggcaac tggaaatcgc |
| 9121 | tgatttgtgt agtcggttta gcagcaacga gacttcacgg aaaatccgct aatccgccac |
| 9181 | agatcctgat cttccagata actgccgtca ctccaacgca gcaccttcac cgcgaggcgg |
| 9241 | ttttctccgg cgcgtaaaaa tcgctcaggt caaattcaga cggcaaacga ctgtcctggc |
| 9301 | cgtaaccgac ccagcgcccg ttgcaccaca gattgaaacg ccgagtttac gcctcaaaaa |
| 9361 | taattcgcgt ctggccttcc tgtagccagc tttcacaact ataatagtga gcgagtaaca |
| 9421 | acccgtcgga ttctccgtgg gaacaaacgg cggattgacc gtatagggat aggttacgtt |
| 9481 | ggtgtagtag ggcgctccgt aaccgtgcta ctgccagttt gaggggacga cgacagtatc |
| 9541 | ggcctcagga agatcgcact ccagccagct ttccggcacc gcttctggta ctggaaacca |
| 9601 | ggcaaagcgc ctatcgccta tcaggctgca caactgttgg gaagggcgat ctgtgcgggc |
| 9661 | ctcttcgcta ttacgccagc ttgcgaaagg gggtagtgct gcaaggcgat taagttgggt |
| 9721 | aacgccaggg ttttcccagt cacgacgtgg atctgggcca ctccctct |

| pP112 (SEQ ID NO: 504) | |
|---|---|
| (SEQ ID NO: 504) | |
| 1 | ctgcgcgctc gctcgctcac tgaggccgcc cgggcaaagc ccgggcgtcg ggcgaccttt |
| 61 | ggtcgcccgg cctcagtgag cgagcgagcg cgcagagagg gagtggccaa ctccatcact |
| 121 | aggggttcct ggaggggtgg agtcgtgacg tgaattacgt catagggtta gggaggtcgg |
| 181 | ccgctctagg agttaatttt taaaaagcag tcaaaagtcc aagtgccctt gcgagcattt |
| 241 | actctctctg tttgctctgg ttaataatct caggagcaca aacattcctt actagttcta |
| 301 | ggagttaatt tttaaaaagc agtcaaaagt ccaagtgccc ttgcgagcat ttactctctc |
| 361 | tgtttgctct ggttaataat ctcaggagca caaacattcc ttactagttc tagagcggcc |
| 421 | gccagtgtgc tggaattcgg cttttttagg gctggaagct acctttgaca tcatttcctc |
| 481 | tgcgaatgca tgtataattt ctacagaacc tattagaaag gatcacccag cctctgcttt |
| 541 | tgtacaactt tcccttaaaa aactgccaat cccactgctg tttggcccaa tagtgagaac |
| 601 | tttttcctgc tgcctcttgg tgcttttgcc tatggcccct attctgcctg ctgaagacac |
| 661 | tcttgccagc atggacttaa acccctccag ctctgacaat cctctttctc ttttgtttta |
| 721 | catgaagggt ctggcagcca aagcaatcac tcaaagttca aaccttatca ttttttgctt |
| 781 | tgttcctctt ggccttggtt ttgtacatca gctttgaaaa taccatccca gggttaatgc |
| 841 | tggggttaat ttataactga gagtgctcta gttctgcaat acaggacatg ctataaaaat |
| 901 | ggaaagatgt tgctttctga gagatcagct tacatgtggt accgagctcg gatccactag |
| 961 | taacggccgc cagtgtgctg gaattcggct ttccaggcca tctccaacca tgggagtgag |
| 1021 | gcacccgccc tgctcccacc ggctcctggc cgtctgcgcc ctcgtgtcct tggcaaccgc |
| 1081 | tgcactcctg gagtttgggc tgagctgggt ctttctggtg gccctgctga agggagtcca |
| 1141 | gtgtgagcag cagggagcca gcagaccagg gccccgggat gcccaggcac accccggccg |
| 1201 | tcccagagca gtgcccacac agtgcgacgt cccccccaac agccgcttcg attgcgcccc |
| 1261 | tgacaaggcc atcacccagg aacagtgcga ggcccgcggc tgctgctaca tccctgcaaa |
| 1321 | gcaggggctg cagggagccc agatggggca gccctggtgc ttcttcccac ccagctaccc |
| 1381 | cagctacaag ctggagaacc tgagctcctc tgaaatgggc tacacggcca ccctgacccg |
| 1441 | taccaccccc accttcttcc ccaaggacat cctgaccctg cggctggacg tgatgatgga |
| 1501 | gactgagaac cgcctccact tcacgatcaa agatccagct aacaggcgct acgaggtgcc |
| 1561 | cttggagacc ccgcgtgtcc acagccgggc accgtcccca ctctacagcg tggagttctc |
| 1621 | cgaggagccc ttcggggtga tcgtgcaccg gcagctggac ggccgcgtgc tgctgaacac |
| 1681 | gacggtggcg cccctgttct ttgcggacca gttccttcag ctgtccacct cgctgccctc |
| 1741 | gcagtatatc acaggcctcg ccgagcacct cagtcccctg atgctcagca ccagctggac |
| 1801 | caggatcacc ctgtggaacc gggaccttgc gcccacgccc ggtgcgaacc tctacgggtc |
| 1861 | tcaccctttc tacctggcgc tggaggacgg cgggtcggca cacggggtgt tcctgctaaa |
| 1921 | cagcaatgcc atggatgtgg tcctgcagcc gagccctgcc cttagctgga ggtcgacagg |
| 1981 | tgggatcctg gatgtctaca tcttcctggg cccagagccc aagagcgtgg tgcagcagta |
| 2041 | cctggacgtt gtgggatacc cgttcatgcc gccatactgg ggcctgggct tccacctgtg |
| 2101 | ccgctggggc tactcctcca ccgctatcac ccgccaggtg gtggagaaca tgaccagggc |
| 2161 | ccacttcccc ctggacgtcc aatggaacga cctggactac atggactccc ggagggactt |
| 2221 | cacgttcaac aaggatggct tccgggactt cccggccatg gtgcaggagc tgcaccaggg |
| 2281 | cggccggcgc tacatgatga tcgtggatcc tgccatcagc agctcgggcc ctgccgggag |
| 2341 | ctacaggccc tacgacgagg gtctgcggag gggggttttc atcaccaacg agaccggcca |
| 2401 | gccgctgatt gggaaggtat ggcccgggtc cactgccttc cccgacttca ccaaccccac |
| 2461 | agccctggcc tggtgggagg acatggtggc tgagttccat gaccaggtgc ccttcgacgg |
| 2521 | catgtggatt gacatgaacg agccttccaa cttcatcaga ggctctgagg acggctgccc |
| 2581 | caacaatgag ctggagaacc caccctacgt gcctggggtg gttgggggga ccctccaggc |
| 2641 | ggccaccatc tgtgcctcca gccaccagtt tctctccaca cactacaacc tgcacaacct |
| 2701 | ctacggcctg accgaagcca tcgcctccca cagggcgctg gtgaaggctc gggggacacg |
| 2761 | cccatttgtg atctcccgct cgacctttgc tggccacggc cgatacgccg gccactggac |
| 2821 | gggggacgtg tggagctcct gggagcagct cgcctcctcc gtgccagaaa tcctgcagtt |
| 2881 | taacctgctg ggggtgcctc tggtcggggc cgacgtctgc ggcttcctgg gcaacacctc |
| 2941 | agaggagctg tgtgtgcgct ggacccagct gggggccttc taccccttca tgcggaacca |
| 3001 | caacagcctg ctcagtctgc cccaggagcc gtacagcttc agcgagccgg cccagcaggc |
| 3061 | catgaggaag gccctcaccc tgcgctacgc actcctcccc cacctctaca cactgttcca |
| 3121 | ccaggcccac gtcgcggggg agaccgtggc ccggcccctc ttcctggagt tccccaagga |
| 3181 | ctctagcacc tggactgtgg accaccagct cctgtggggg gaggccctgc tcatcacccc |
| 3241 | agtgctccag gccgggaagg ccgaagtgac tggctacttc cccttgggca catggtacga |
| 3301 | cctgcagacg gtgccaatag aggcccttgg cagcctccca cccccacctg cagctccccg |
| 3361 | tgagccagcc atccacagcg aggggcagtg ggtgacgctg ccggcccccc tggacaccat |
| 3421 | caacgtccac ctccgggctg ggtacatcat ccccctgcag ggccctggcc tcacaaccac |
| 3481 | agagtcccgc cagcagccca tggccctggc tgtggccctg accaagggtg gagaggcccg |
| 3541 | aggggagctg ttctgggacg atggagagag cctggaagtg ctggagcgag gggcctacac |
| 3601 | acaggtcatc ttcctggcca ggaataacac gatcgtgaat gagctggtac gtgtgaccag |
| 3661 | tgagggagct ggcctgcagc tgcagaaggt gactgtcctg ggcgtggcca cggcgcccca |
| 3721 | gcaggtcctc tccaacggtg tccctgtctc caacttcacc tacagccccg acaccaaggt |
| 3781 | cctggacatc tgtgtctcgc tgttgatggg agagcagttt ctcgtcagct ggtgttagcc |
| 3841 | gggcggagtg tgttagtctc tccagaggga ggctggttcc ccagggaagc agagcctgtg |
| 3901 | tgcgggcagc agctgtgtgc gggcctgggg gttgttaagt gcaattattt ttaataaaag |
| 3961 | gggcatttgg aaaaaaaaaa aaaaggtagc agtcgacaga tgaattctgc agatctgtgg |
| 4021 | cttctagctg cccgggtggc atccctgtga cccctcccca gtgcctctcc tggccctgga |
| 4081 | agttgccact ccagtgccca ccagccttgt cctaataaaa ttaagttgca tcattttgtc |
| 4141 | tgactaggtg tccttctata atattatggg gtggaggggg gtggtatgga gcaaggggca |
| 4201 | agttgggaag acaacctgag ttgttgggat tccaggcatc gagtagataa gtagcatggc |
| 4261 | gggttaatca ttaactacaa ggaaccccta gtgatggagt tggccactcc ctctctgcgc |
| 4321 | gctcgctcgc tcactgaggc cgggcgacca aaggtcgccc gacgcccggg ctttgcccgg |
| 4381 | gcggcctcag tgagcgagcg agcgcgcaga gagggacaga tccgaagccg ggcaaatcag |
| 4441 | cgcctggcag cagtggcgtc tggcggaaaa cctcagtgtg acgctccccg ccgcgtccca |
| 4501 | cgcttgttcc cggatctgac caccagcgaa atccgatttt tgcaccgagc tgggtaataa |
| 4561 | gcgttggcaa tttaaccgcc agtcaggctt tctttcacag tgtggattgg cgataaaaaa |
| 4621 | caactgctga cgccgctgcg cgatcagttc acccgttcac cgctggataa cgacttggcg |
| 4681 | taagtgaagc gacccgtaag accctaacgc ctgggtcgaa cgctggaagg cggcgggcca |
| 4741 | aaccaggccg aagcagcgtt gttgcagttc acggcagata cacttgctgt tgcggtgctg |
| 4801 | attacgaccg ctcactcgtg gcagcaacag gggaaaacct tatttatcag ccggaaaacc |
| 4861 | taccggattg ttggtagtgg tcaataggcg attaccgttg tgttgaagtg gcgagcgata |
| 4921 | caccgcttcc ggcgcggatt ggcctgaact gccaactggc gcaggtagca gagcgggtaa |
| 4981 | actggctcgg attagggccg caagaaaact atcccgaccg ccttactgcc gcctgttttg |
| 5041 | accgctggga tctgccaagt cagacagtat agcccgtacg tcttcccgag cgaaaacggt |
| 5101 | ctgcgctgcg ggacgcgcga attgaatttg gcccacacca gtggcgcggc gacttccagt |
| 5161 | tcaatatcag ccgctacagt gaacagcaac tgttggaaac cagccttcgc caactgctgc |
| 5221 | acgcggaaga aggcactggc tgaatatcga cggtttccag ttggggattg gtggcgacga |
| 5281 | ctcctggagc ccgtcagtat cggcggactt ccaactgagc gccggtcgct accttaccag |
| 5341 | ttggtctggt gtcaaaaagc gtccgcttga gtctagcgat cgcgcgcaga tctgtcatgt |
| 5401 | gagcaaaagg ccagcaaaag gccaggaacc gtaaaaaggc cgcgttgctg gcgtttttcc |
| 5461 | ataggctccg cccccctgac gagcatcaca aaaatcgacg ctcaagtcag aggtggcgaa |
| 5521 | acccgacagg actataaaga taccaggcgt ttccccctgg aagctccctc gtgcgctctc |
| 5581 | ctgttccgac cctgccgctt accggatacc tgtccgcctt tctcccttcg ggaagcgtgg |
| 5641 | cgctttctca tagctcacgc tgtaggtatc tcagttcggt gtaggtcgtt cgctccaagc |
| 5701 | tgggctgtgt gcacgaaccc cccgttcagc ccgaccgctg cgccttatcc ggtaactatc |
| 5761 | gtcttgagtc caacccggta agacacgact tatcgccact ggcagcagcc actggtaaca |
| 5821 | ggattagcag agcgaggtat gtaggcggtg ctacagagtt cttgaagtgg tggcctaact |
| 5881 | acggctacac tagaagaaca gtatttggta tctgcgctct gctgaagcca gttaccttcg |
| 5941 | gaaaaagagt tggtagctct tgatccggca aacaaaccac cgctggtagc ggtggttttt |
| 6001 | ttgtttgcaa gcagcagatt acgcgcagaa aaaaaggatc tcaagaagat cctttgatct |
| 6061 | tttctacggg gtctgacgct cagtggaacg aaaactcacg ttaagggatt ttggtcatga |
| 6121 | gattatcaaa aaggatcttc acctagatcc ttttcacgta gaaagccagt ccgcagaaac |
| 6181 | ggtgctgacc ccggatgaat gtcagctact gggctatctg gacaagggaa aacgcaagcg |
| 6241 | caaagagaaa gcaggtagct tgcagtgggc ttacatggcg atagctagac tgggcggttt |
| 6301 | tatggacagc aagcgaaccg gaattgccag ctggggcgcc ctctggtaag gttgggaagc |
| 6361 | cctgcaaagt aaactggatg gctttcttgc cgccaaggat ctgatggcgc aggggatcaa |
| 6421 | gatctgatca agagacagga tgaggatcgt ttcgcatgat tgaacaagat ggattgcacg |
| 6481 | caggttctcc ggccgcttgg gtggagaggc tattcggcta tgactgggca caacagacaa |
| 6541 | tcggctgctc tgatgccgcc gtgttccggc tgtcagcgca ggggcgcccg gttctttttg |
| 6601 | tcaagaccga cctgtccggt gccctgaatg aactgcaaga cgaggcagcg cggctatcgt |
| 6661 | ggctggccac gacgggcgtt ccttgcgcag ctgtgctcga cgttgtcact gaagcgggaa |
| 6721 | gggactggct gctattgggc gaagtgccgg ggcaggatct cctgtcatct caccttgctc |
| 6781 | ctgccgagaa agtatccatc atggctgatg caatgcggcg gctgcatacg cttgatccgg |
| 6841 | ctacctgccc attcgaccac caagcgaaac atcgcatcga gcgagcacgt actcggatgg |
| 6901 | aagccggtct tgtcgatcag gatgatctgg acgaagagca tcaggggctc gcgccagccg |
| 6961 | aactgttcgc caggctcaag gcgagcatgc ccgacggcga ggatctcgtc gtgacccatg |
| 7021 | gcgatgcctg cttgccgaat atcatggtgg aaaatggccg cttttctgga ttcatcgact |
| 7081 | gtggccggct gggtgtggcg gaccgctatc aggacatagc gttggctacc cgtgatattg |
| 7141 | ctgaagagct tggcggcgaa tgggctgacc gcttcctcgt gctttacggt atcgccgctc |
| 7201 | ccgattcgca gcgcatcgcc ttctatcgcc ttcttgacga gttcttctga atttaaagcc |
| 7261 | caatacgcaa accgcctctc cccgcgcgtt ggccgaagcg gttcaatatt ttgttaaaat |
| 7321 | tcgcgttaaa tttttgttaa atcagctatt ttttaaccaa taggccgaaa tcggcaaaat |
| 7381 | cccttgtaaa tcaaaagaat agaccgagat agggttgagt gttgttccag tttggaacaa |
| 7441 | gagtccacta ttaaagaacg tggactccaa cgtcaaaggg cgaaaaaccg tctatcaggg |
| 7501 | cgttggccca ctacgtgaac cttcacccta atcaagtttt ttggggtcga ggtgccgtaa |
| 7561 | agcactaaat cggaacccta aagggagccc ccgatttaga gcttgacggg gaaaccggcg |
| 7621 | aacgtggcga gaaaggaagg gaagaaagcg aaaggagcgg gcgctagggc gctggcaagt |
| 7681 | gtagcggtca cgctgcgcgt aaccaccaca cccgccgcgc taagcgccgc tacagggcgc |
| 7741 | gtcccttcgc cttcaggctg cgtcgagtac tgtactgtga gccagagttg cccggcgctc |
| 7801 | tccggctgcg gtagttcagg cagttcaatc aactgtttac cttgtggagc gactccagag |
| 7861 | gcacttcacc gcttgccagc ggcttacgat ccagcgccac gatccagtgc aggagatcgt |
| 7921 | tatcgctata cggaacaggt attcgctggt cacttcgata aggtttgccc ggataaacgg |
| 7981 | aactggaaaa actgctgctg gtgttttgct tccgtcagtg ctggatcggc gtgcggtcgg |
| 8041 | caaagaccag accgttctaa cagaactggc gattgttcgg cgtatcgcca aaatcaccgc |
| 8101 | cgtaagccga ccacgggttg ccgttttcag caggatttaa tcagcgactg atccacccag |
| 8161 | tcccagacga agccgccctg taaacgggga tactgacgaa acgcctgcca gtatttagcg |
| 8221 | aaaccgccaa gactgttacc caagcgtggg cgtattcgca aaggatcagc gggcgcgtct |
| 8281 | ctccaggtag cgaaagcctt ttttgatcga cctttcggca cagccgggaa gggctggtct |
| 8341 | tcaaccacgc gcgcgtacaa cgggcaaata atatcggtgg ccgtggtgtc ggctccgccg |
| 8401 | ccttcaactg caccgggcgg gaaggatcga cagatttgat ccagcgatac agcgcgtcgt |
| 8461 | gattagcgcc gtggcctgat tcaattcccc agcgaccagt agatcacact cgggtgatta |
| 8521 | cgattgcgct gcaccagtcg cgttacggtt cgctcttcgc cggtagccag cgcggatcac |
| 8581 | ggtcagacga ttcgttggca cgatccgtgg gtttcaatac tggcttcaaa ccaccactaa |
| 8641 | caggccgtag cggtcgcaca gcgtgtacca cagcggttgg ttcggataat cgaacagcgc |
| 8701 | acggcgttaa agttgttctg cttcaacagc aggatattct gcaccttcgt ctgctcttcc |
| 8761 | taacctgacc aagcagagga tctgctcgtg acggttaatc ctcgaatcag caacggcttg |
| 8821 | ccgttcagca gcagcagacc aagttcaatc cgcacctcgc ggaaaccgac aacgcaggct |
| 8881 | tctgcttcaa tcagcgtgcc gtcggcggtg tgcagttcaa ccaccgcacg atagagattc |
| 8941 | gggatttcgg cgctccacag tttcgggttt tcgacgttca gacgtagtgt gacgcgatct |
| 9001 | gcaaaccacc acgctcaacg ataatttcac cgccgaaagg cgcggtgccg ctggcgacct |
| 9061 | gcgtttcacc ctgccagaaa gaaactgtta cccgtaggta gtcacgcaac tcgccgcaca |
| 9121 | ctgaacttca gcctccagta cagcgcggct gaaatcgtct taaagcgagt ggcaactgga |
| 9181 | aatcgctgat ttgtgtagtc ggtttagcag caacgagact tcacggaaaa tccgctaatc |
| 9241 | cgccacagat cctgatcttc cagataactg ccgtcactcc aacgcagcac cttcaccgcg |
| 9301 | aggcggtttt ctccggcgcg taaaaatcgc tcaggtcaaa ttcagacggc aaacgactgt |
| 9361 | cctggccgta accgacccag cgcccgttgc accacagatt gaaacgccga gtttacgcct |
| 9421 | caaaaataat tcgcgtctgg ccttcctgta gccagctttc acaactataa tagtgagcga |
| 9481 | gtaacaaccc gtcggattct ccgtgggaac aaacggcgga ttgaccgtat agggataggt |
| 9541 | tacgttggtg tagtagggcg ctccgtaacc gtgctactgc cagtttgagg ggacgacgac |
| 9601 | agtatcggcc tcaggaagat cgcactccag ccagctttcc ggcaccgctt ctggtactgg |
| 9661 | aaaccaggca aagcgcctat cgcctatcag gctgcacaac tgttgggaag ggcgatctgt |
| 9721 | gcgggcctct tcgctattac gccagcttgc gaaagggggt agtgctgcaa ggcgattaag |
| 9781 | ttgggtaacg ccagggtttt cccagtcacg acgtggatct gggccactcc ctct |

| pP113 (SEQ ID NO: 505) | |
|---|---|
| (SEQ ID NO: 505) | |
| 1 | ctgcgcgctc gctcgctcac tgaggccgcc cgggcaaagc ccgggcgtcg ggcgaccttt |
| 61 | ggtcgcccgg cctcagtgag cgagcgagcg cgcagagagg gagtggccaa ctccatcact |
| 121 | aggggttcct ggaggggtgg agtcgtgacg tgaattacgt catagggtta gggaggtcgg |
| 181 | ccgctctagg agttaatttt taaaaagcag tcaaaagtcc aagtgccctt gcgagcattt |
| 241 | actctctctg tttgctctgg ttaataatct caggagcaca aacattcctt actagttcta |
| 301 | ggagttaatt tttaaaaagc agtcaaaagt ccaagtgccc ttgcgagcat ttactctctc |
| 361 | tgtttgctct ggttaataat ctcaggagca caaacattcc ttactagttc tagagcggcc |
| 421 | gccagtgtgc tggaattcgg cttttttagg gctggaagct acctttgaca tcatttcctc |
| 481 | tgcgaatgca tgtataattt ctacagaacc tattagaaag gatcacccag cctctgcttt |
| 541 | tgtacaactt tcccttaaaa aactgccaat cccactgctg tttggcccaa tagtgagaac |
| 601 | tttttcctgc tgcctcttgg tgcttttgcc tatggcccct attctgcctg ctgaagacac |
| 661 | tcttgccagc atggacttaa acccctccag ctctgacaat cctctttctc ttttgtttta |
| 721 | catgaagggt ctggcagcca aagcaatcac tcaaagttca aaccttatca ttttttgctt |
| 781 | tgttcctctt ggccttggtt ttgtacatca gctttgaaaa taccatccca gggttaatgc |
| 841 | tggggttaat ttataactga gagtgctcta gttctgcaat acaggacatg ctataaaaat |
| 901 | ggaaagatgt tgctttctga gagatcagct tacatgtggt accgagctcg gatccactag |
| 961 | taacggccgc cagtgtgctg gaattcggct ttccaggcca tctccaacca tgggagtgag |
| 1021 | gcacccgccc tgctcccacc ggctcctggc cgtctgcgcc ctcgtgtcct tggcaaccgc |
| 1081 | tatggagttt gggctgagct gggtctttct ggtggccctg ctgaagggag tccagtgtga |
| 1141 | gcagcaggga gccagcagac cagggccccg ggatgcccag gcacaccccg gccgtcccag |
| 1201 | agcagtgccc acacagtgcg acgtcccccc caacagccgc ttcgattgcg cccctgacaa |
| 1261 | ggccatcacc caggaacagt gcgaggcccg cggctgctgc tacatccctg caaagcaggg |
| 1321 | gctgcaggga gcccagatgg ggcagccctg gtgcttcttc ccacccagct accccagcta |
| 1381 | caagctggag aacctgagct cctctgaaat gggctacacg gccaccctga cccgtaccac |
| 1441 | ccccaccttc ttccccaagg acatcctgac cctgcggctg gacgtgatga tggagactga |
| 1501 | gaaccgcctc cacttcacga tcaaagatcc agctaacagg cgctacgagg tgcccttgga |
| 1561 | gaccccgcgt gtccacagcc gggcaccgtc cccactctac agcgtggagt tctccgagga |
| 1621 | gcccttcggg gtgatcgtgc accggcagct ggacggccgc gtgctgctga acacgacggt |
| 1681 | ggcgcccctg ttctttgcgg accagttcct tcagctgtcc acctcgctgc cctcgcagta |
| 1741 | tatcacaggc ctcgccgagc acctcagtcc cctgatgctc agcaccagct ggaccaggat |
| 1801 | caccctgtgg aaccgggacc ttgcgcccac gcccggtgcg aacctctacg ggtctcaccc |
| 1861 | tttctacctg gcgctggagg acggcgggtc ggcacacggg gtgttcctgc taaacagcaa |
| 1921 | tgccatggat gtggtcctgc agccgagccc tgcccttagc tggaggtcga caggtgggat |
| 1981 | cctggatgtc tacatcttcc tgggcccaga gcccaagagc gtggtgcagc agtacctgga |
| 2041 | cgttgtggga tacccgttca tgccgccata ctggggcctg ggcttccacc tgtgccgctg |
| 2101 | gggctactcc tccaccgcta tcacccgcca ggtggtggag aacatgacca gggcccactt |
| 2161 | ccccctggac gtccaatgga acgacctgga ctacatggac tcccggaggg acttcacgtt |
| 2221 | caacaaggat ggcttccggg acttcccggc catggtgcag gagctgcacc agggcggccg |
| 2281 | gcgctacatg atgatcgtgg atcctgccat cagcagctcg ggccctgccg ggagctacag |
| 2341 | gccctacgac gagggtctgc ggaggggggt tttcatcacc aacgagaccg gccagccgct |
| 2401 | gattgggaag gtatggcccg ggtccactgc cttccccgac ttcaccaacc ccacagccct |
| 2461 | ggcctggtgg gaggacatgg tggctgagtt ccatgaccag gtgcccttcg acggcatgtg |
| 2521 | gattgacatg aacgagcctt ccaacttcat cagaggctct gaggacggct gccccaacaa |
| 2581 | tgagctggag aacccaccct acgtgcctgg ggtggttggg gggaccctcc aggcggccac |
| 2641 | catctgtgcc tccagccacc agtttctctc cacacactac aacctgcaca acctctacgg |
| 2701 | cctgaccgaa gccatcgcct cccacagggc gctggtgaag gctcggggga cacgcccatt |
| 2761 | tgtgatctcc cgctcgacct ttgctggcca cggccgatac gccggccact ggacggggga |
| 2821 | cgtgtggagc tcctgggagc agctcgcctc ctccgtgcca gaaatcctgc agtttaacct |
| 2881 | gctgggggtg cctctggtcg gggccgacgt ctgcggcttc ctgggcaaca cctcagagga |
| 2941 | gctgtgtgtg cgctggaccc agctgggggc cttctacccc ttcatgcgga accacaacag |
| 3001 | cctgctcagt ctgccccagg agccgtacag cttcagcgag ccggcccagc aggccatgag |
| 3061 | gaaggccctc accctgcgct acgcactcct cccccacctc tacacactgt tccaccaggc |
| 3121 | ccacgtcgcg ggggagaccg tggcccggcc cctcttcctg gagttcccca aggactctag |
| 3181 | cacctggact gtggaccacc agctcctgtg gggggaggcc ctgctcatca ccccagtgct |
| 3241 | ccaggccggg aaggccgaag tgactggcta cttccccttg ggcacatggt acgacctgca |
| 3301 | gacggtgcca atagaggccc ttggcagcct cccaccccca cctgcagctc cccgtgagcc |
| 3361 | agccatccac agcgaggggc agtgggtgac gctgccggcc cccctggaca ccatcaacgt |
| 3421 | ccacctccgg gctgggtaca tcatccccct gcagggccct ggcctcacaa ccacagagtc |
| 3481 | ccgccagcag cccatggccc tggctgtggc cctgaccaag ggtggagagg cccgagggga |
| 3541 | gctgttctgg gacgatggag agagcctgga agtgctggag cgaggggcct acacacaggt |
| 3601 | catcttcctg gccaggaata acacgatcgt gaatgagctg gtacgtgtga ccagtgaggg |
| 3661 | agctggcctg cagctgcaga aggtgactgt cctgggcgtg gccacggcgc cccagcaggt |
| 3721 | cctctccaac ggtgtccctg tctccaactt cacctacagc cccgacacca aggtcctgga |
| 3781 | catctgtgtc tcgctgttga tgggagagca gtttctcgtc agctggtgtt agccgggcgg |
| 3841 | agtgtgttag tctctccaga gggaggctgg ttccccaggg aagcagagcc tgtgtgcggg |
| 3901 | cagcagctgt gtgcgggcct gggggttgtt aagtgcaatt atttttaata aaaggggcat |
| 3961 | ttggaaaaaa aaaaaaaagg tagcagtcga cagatgaatt ctgcagatct gtggcttcta |
| 4021 | gctgcccggg tggcatccct gtgacccctc cccagtgcct ctcctggccc tggaagttgc |
| 4081 | cactccagtg cccaccagcc ttgtcctaat aaaattaagt tgcatcattt tgtctgacta |
| 4141 | ggtgtccttc tataatatta tggggtggag gggggtggta tggagcaagg ggcaagttgg |
| 4201 | gaagacaacc tgagttgttg ggattccagg catcgagtag ataagtagca tggcgggtta |
| 4261 | atcattaact acaaggaacc cctagtgatg gagttggcca ctccctctct gcgcgctcgc |
| 4321 | tcgctcactg aggccgggcg accaaaggtc gcccgacgcc cgggctttgc ccgggcggcc |
| 4381 | tcagtgagcg agcgagcgcg cagagaggga cagatccgaa gccgggcaaa tcagcgcctg |
| 4441 | gcagcagtgg cgtctggcgg aaaacctcag tgtgacgctc cccgccgcgt cccacgcttg |
| 4501 | ttcccggatc tgaccaccag cgaaatccga tttttgcacc gagctgggta ataagcgttg |
| 4561 | gcaatttaac cgccagtcag gctttctttc acagtgtgga ttggcgataa aaaacaactg |
| 4621 | ctgacgccgc tgcgcgatca gttcacccgt tcaccgctgg ataacgactt ggcgtaagtg |
| 4681 | aagcgacccg taagacccta acgcctgggt cgaacgctgg aaggcggcgg gccaaaccag |
| 4741 | gccgaagcag cgttgttgca gttcacggca gatacacttg ctgttgcggt gctgattacg |
| 4801 | accgctcact cgtggcagca acaggggaaa accttattta tcagccggaa aacctaccgg |
| 4861 | attgttggta gtggtcaata ggcgattacc gttgtgttga agtggcgagc gatacaccgc |
| 4921 | ttccggcgcg gattggcctg aactgccaac tggcgcaggt agcagagcgg gtaaactggc |
| 4981 | tcggattagg gccgcaagaa aactatcccg accgccttac tgccgcctgt tttgaccgct |
| 5041 | gggatctgcc aagtcagaca gtatagcccg tacgtcttcc cgagcgaaaa cggtctgcgc |
| 5101 | tgcgggacgc gcgaattgaa tttggcccac accagtggcg cggcgacttc cagttcaata |
| 5161 | tcagccgcta cagtgaacag caactgttgg aaaccagcct tcgccaactg ctgcacgcgg |
| 5221 | aagaaggcac tggctgaata tcgacggttt ccagttgggg attggtggcg acgactcctg |
| 5281 | gagcccgtca gtatcggcgg acttccaact gagcgccggt cgctacctta ccagttggtc |
| 5341 | tggtgtcaaa aagcgtccgc ttgagtctag cgatcgcgcg cagatctgtc atgtgagcaa |
| 5401 | aaggccagca aaaggccagg aaccgtaaaa aggccgcgtt gctggcgttt ttccataggc |
| 5461 | tccgcccccc tgacgagcat cacaaaaatc gacgctcaag tcagaggtgg cgaaacccga |
| 5521 | caggactata aagataccag gcgtttcccc ctggaagctc cctcgtgcgc tctcctgttc |
| 5581 | cgaccctgcc gcttaccgga tacctgtccg cctttctccc ttcgggaagc gtggcgcttt |
| 5641 | ctcatagctc acgctgtagg tatctcagtt cggtgtaggt cgttcgctcc aagctgggct |
| 5701 | gtgtgcacga accccccgtt cagcccgacc gctgcgcctt atccggtaac tatcgtcttg |
| 5761 | agtccaaccc ggtaagacac gacttatcgc cactggcagc agccactggt aacaggatta |
| 5821 | gcagagcgag gtatgtaggc ggtgctacag agttcttgaa gtggtggcct aactacggct |
| 5881 | acactagaag aacagtattt ggtatctgcg ctctgctgaa gccagttacc ttcggaaaaa |
| 5941 | gagttggtag ctcttgatcc ggcaaacaaa ccaccgctgg tagcggtggt ttttttgttt |
| 6001 | gcaagcagca gattacgcgc agaaaaaaag gatctcaaga agatcctttg atcttttcta |
| 6061 | cggggtctga cgctcagtgg aacgaaaact cacgttaagg gattttggtc atgagattat |
| 6121 | caaaaaggat cttcacctag atccttttca cgtagaaagc cagtccgcag aaacggtgct |
| 6181 | gaccccggat gaatgtcagc tactgggcta tctggacaag ggaaaacgca agcgcaaaga |
| 6241 | gaaagcaggt agcttgcagt gggcttacat ggcgatagct agactgggcg gttttatgga |
| 6301 | cagcaagcga accggaattg ccagctgggg cgccctctgg taaggttggg aagccctgca |
| 6361 | aagtaaactg gatggctttc ttgccgccaa ggatctgatg gcgcagggga tcaagatctg |
| 6421 | atcaagagac aggatgagga tcgtttcgca tgattgaaca agatggattg cacgcaggtt |
| 6481 | ctccggccgc ttgggtggag aggctattcg gctatgactg ggcacaacag acaatcggct |
| 6541 | gctctgatgc cgccgtgttc cggctgtcag cgcaggggcg cccggttctt tttgtcaaga |
| 6601 | ccgacctgtc cggtgccctg aatgaactgc aagacgaggc agcgcggcta tcgtggctgg |
| 6661 | ccacgacggg cgttccttgc gcagctgtgc tcgacgttgt cactgaagcg ggaagggact |
| 6721 | ggctgctatt gggcgaagtg ccggggcagg atctcctgtc atctcacctt gctcctgccg |
| 6781 | agaaagtatc catcatggct gatgcaatgc ggcggctgca tacgcttgat ccggctacct |
| 6841 | gcccattcga ccaccaagcg aaacatcgca tcgagcgagc acgtactcgg atggaagccg |
| 6901 | gtcttgtcga tcaggatgat ctggacgaag agcatcaggg gctcgcgcca gccgaactgt |
| 6961 | tcgccaggct caaggcgagc atgcccgacg gcgaggatct cgtcgtgacc catggcgatg |
| 7021 | cctgcttgcc gaatatcatg gtggaaaatg gccgcttttc tggattcatc gactgtggcc |
| 7081 | ggctgggtgt ggcggaccgc tatcaggaca tagcgttggc tacccgtgat attgctgaag |
| 7141 | agcttggcgg cgaatgggct gaccgcttcc tcgtgcttta cggtatcgcc gctcccgatt |
| 7201 | cgcagcgcat cgccttctat cgccttcttg acgagttctt ctgaatttaa agcccaatac |
| 7261 | gcaaaccgcc tctccccgcg cgttggccga agcggttcaa tattttgtta aaattcgcgt |
| 7321 | taaatttttg ttaaatcagc tattttttaa ccaataggcc gaaatcggca aaatcccttg |
| 7381 | taaatcaaaa gaatagaccg agatagggtt gagtgttgtt ccagtttgga acaagagtcc |
| 7441 | actattaaag aacgtggact ccaacgtcaa agggcgaaaa accgtctatc agggcgttgg |
| 7501 | cccactacgt gaaccttcac cctaatcaag ttttttgggg tcgaggtgcc gtaaagcact |
| 7561 | aaatcggaac cctaaaggga gcccccgatt tagagcttga cggggaaacc ggcgaacgtg |
| 7621 | gcgagaaagg aagggaagaa agcgaaagga gcgggcgcta gggcgctggc aagtgtagcg |
| 7681 | gtcacgctgc gcgtaaccac cacacccgcc gcgctaagcg ccgctacagg gcgcgtccct |
| 7741 | tcgccttcag gctgcgtcga gtactgtact gtgagccaga gttgcccggc gctctccggc |
| 7801 | tgcggtagtt caggcagttc aatcaactgt ttaccttgtg gagcgactcc agaggcactt |
| 7861 | caccgcttgc cagcggctta cgatccagcg ccacgatcca gtgcaggaga tcgttatcgc |
| 7921 | tatacggaac aggtattcgc tggtcacttc gataaggttt gcccggataa acggaactgg |
| 7981 | aaaaactgct gctggtgttt tgcttccgtc agtgctggat cggcgtgcgg tcggcaaaga |
| 8041 | ccagaccgtt ctaacagaac tggcgattgt tcggcgtatc gccaaaatca ccgccgtaag |
| 8101 | ccgaccacgg gttgccgttt tcagcaggat ttaatcagcg actgatccac ccagtcccag |
| 8161 | acgaagccgc cctgtaaacg gggatactga cgaaacgcct gccagtattt agcgaaaccg |
| 8221 | ccaagactgt tacccaagcg tgggcgtatt cgcaaaggat cagcgggcgc gtctctccag |
| 8281 | gtagcgaaag ccttttttga tcgacctttc ggcacagccg ggaagggctg gtcttcaacc |
| 8341 | acgcgcgcgt acaacgggca aataatatcg gtggccgtgg tgtcggctcc gccgccttca |
| 8401 | actgcaccgg gcgggaagga tcgacagatt tgatccagcg atacagcgcg tcgtgattag |
| 8461 | cgccgtggcc tgattcaatt ccccagcgac cagtagatca cactcgggtg attacgattg |
| 8521 | cgctgcacca gtcgcgttac ggttcgctct tcgccggtag ccagcgcgga tcacggtcag |
| 8581 | acgattcgtt ggcacgatcc gtgggtttca atactggctt caaaccacca ctaacaggcc |
| 8641 | gtagcggtcg cacagcgtgt accacagcgg ttggttcgga taatcgaaca gcgcacggcg |
| 8701 | ttaaagttgt tctgcttcaa cagcaggata ttctgcacct tcgtctgctc ttcctaacct |
| 8761 | gaccaagcag aggatctgct cgtgacggtt aatcctcgaa tcagcaacgg cttgccgttc |
| 8821 | agcagcagca gaccaagttc aatccgcacc tcgcggaaac cgacaacgca ggcttctgct |
| 8881 | tcaatcagcg tgccgtcggc ggtgtgcagt tcaaccaccg cacgatagag attcgggatt |
| 8941 | tcggcgctcc acagtttcgg gttttcgacg ttcagacgta gtgtgacgcg atctgcaaac |
| 9001 | caccacgctc aacgataatt tcaccgccga aaggcgcggt gccgctggcg acctgcgttt |
| 9061 | caccctgcca gaaagaaact gttacccgta ggtagtcacg caactcgccg cacactgaac |
| 9121 | ttcagcctcc agtacagcgc ggctgaaatc gtcttaaagc gagtggcaac tggaaatcgc |
| 9181 | tgatttgtgt agtcggttta gcagcaacga gacttcacgg aaaatccgct aatccgccac |
| 9241 | agatcctgat cttccagata actgccgtca ctccaacgca gcaccttcac cgcgaggcgg |
| 9301 | ttttctccgg cgcgtaaaaa tcgctcaggt caaattcaga cggcaaacga ctgtcctggc |
| 9361 | cgtaaccgac ccagcgcccg ttgcaccaca gattgaaacg ccgagtttac gcctcaaaaa |
| 9421 | taattcgcgt ctggccttcc tgtagccagc tttcacaact ataatagtga gcgagtaaca |
| 9481 | acccgtcgga ttctccgtgg gaacaaacgg cggattgacc gtatagggat aggttacgtt |
| 9541 | ggtgtagtag ggcgctccgt aaccgtgcta ctgccagttt gaggggacga cgacagtatc |
| 9601 | ggcctcagga agatcgcact ccagccagct ttccggcacc gcttctggta ctggaaacca |
| 9661 | ggcaaagcgc ctatcgccta tcaggctgca caactgttgg gaagggcgat ctgtgcgggc |
| 9721 | ctcttcgcta ttacgccagc ttgcgaaagg gggtagtgct gcaaggcgat taagttgggt |
| 9781 | aacgccaggg ttttcccagt cacgacgtgg atctgggcca ctccctct |

| pP114 (SEQ ID NO: 506) | |
|---|---|
| (SEQ ID NO: 506) | |
| 1 | ctgcgcgctc gctcgctcac tgaggccgcc cgggcaaagc ccgggcgtcg ggcgaccttt |
| 61 | ggtcgcccgg cctcagtgag cgagcgagcg cgcagagagg gagtggccaa ctccatcact |
| 121 | aggggttcct ggaggggtgg agtcgtgacg tgaattacgt catagggtta gggaggtcgg |
| 181 | ccgctctagg agttaatttt taaaaagcag tcaaaagtcc aagtgccctt gcgagcattt |
| 241 | actctctctg tttgctctgg ttaataatct caggagcaca aacattcctt actagttcta |
| 301 | ggagttaatt tttaaaaagc agtcaaaagt ccaagtgccc ttgcgagcat ttactctctc |
| 361 | tgtttgctct ggttaataat ctcaggagca caaacattcc ttactagttc tagagcggcc |
| 421 | gccagtgtgc tggaattcgg cttttttagg gctggaagct acctttgaca tcatttcctc |
| 481 | tgcgaatgca tgtataattt ctacagaacc tattagaaag gatcacccag cctctgcttt |
| 541 | tgtacaactt tcccttaaaa aactgccaat cccactgctg tttggcccaa tagtgagaac |
| 601 | tttttcctgc tgcctcttgg tgcttttgcc tatggcccct attctgcctg ctgaagacac |
| 661 | tcttgccagc atggacttaa acccctccag ctctgacaat cctctttctc ttttgtttta |
| 721 | catgaagggt ctggcagcca aagcaatcac tcaaagttca aaccttatca ttttttgctt |
| 781 | tgttcctctt ggccttggtt ttgtacatca gctttgaaaa taccatccca gggttaatgc |
| 841 | tggggttaat ttataactga gagtgctcta gttctgcaat acaggacatg ctataaaaat |
| 901 | ggaaagatgt tgctttctga gagatcagct tacatgtggt accgagctcg gatccactag |
| 961 | taacggccgc cagtgtgctg gaattcggct ttccaggcca tctccaacca tggggtacag |
| 1021 | aatgcagctg ctgtcctgca ttgcactgtc actggcactg gttaccaact cacagcaggg |
| 1081 | agccagcaga ccagggcccc gggatgccca ggcacacccc ggccgtccca gagcagtgcc |
| 1141 | cacacagtgc gacgtccccc ccaacagccg cttcgattgc gcccctgaca aggccatcac |
| 1201 | ccaggaacag tgcgaggccc gcggctgctg ctacatccct gcaaagcagg ggctgcaggg |
| 1261 | agcccagatg gggcagccct ggtgcttctt cccacccagc taccccagct acaagctgga |
| 1321 | gaacctgagc tcctctgaaa tgggctacac ggccaccctg acccgtacca cccccacctt |
| 1381 | cttccccaag gacatcctga ccctgcggct ggacgtgatg atggagactg agaaccgcct |
| 1441 | ccacttcacg atcaaagatc cagctaacag gcgctacgag gtgcccttgg agaccccgcg |
| 1501 | tgtccacagc cgggcaccgt ccccactcta cagcgtggag ttctccgagg agcccttcgg |
| 1561 | ggtgatcgtg caccggcagc tggacggccg cgtgctgctg aacacgacgg tggcgcccct |
| 1621 | gttctttgcg gaccagttcc ttcagctgtc cacctcgctg ccctcgcagt atatcacagg |
| 1681 | cctcgccgag cacctcagtc ccctgatgct cagcaccagc tggaccagga tcaccctgtg |
| 1741 | gaaccgggac cttgcgccca cgcccggtgc gaacctctac gggtctcacc ctttctacct |
| 1801 | ggcgctggag gacggcgggt cggcacacgg ggtgttcctg ctaaacagca atgccatgga |
| 1861 | tgtggtcctg cagccgagcc ctgcccttag ctggaggtcg acaggtggga tcctggatgt |
| 1921 | ctacatcttc ctgggcccag agcccaagag cgtggtgcag cagtacctgg acgttgtggg |
| 1981 | atacccgttc atgccgccat actggggcct gggcttccac ctgtgccgct ggggctactc |
| 2041 | ctccaccgct atcacccgcc aggtggtgga gaacatgacc agggcccact tccccctgga |
| 2101 | cgtccaatgg aacgacctgg actacatgga ctcccggagg gacttcacgt tcaacaagga |
| 2161 | tggcttccgg gacttcccgg ccatggtgca ggagctgcac cagggcggcc ggcgctacat |
| 2221 | gatgatcgtg gatcctgcca tcagcagctc gggccctgcc gggagctaca ggccctacga |
| 2281 | cgagggtctg cggagggggg ttttcatcac caacgagacc ggccagccgc tgattgggaa |
| 2341 | ggtatggccc gggtccactg ccttccccga cttcaccaac cccacagccc tggcctggtg |
| 2401 | ggaggacatg gtggctgagt tccatgacca ggtgcccttc gacggcatgt ggattgacat |
| 2461 | gaacgagcct tccaacttca tcagaggctc tgaggacggc tgccccaaca atgagctgga |
| 2521 | gaacccaccc tacgtgcctg gggtggttgg ggggaccctc caggcggcca ccatctgtgc |
| 2581 | ctccagccac cagtttctct ccacacacta caacctgcac aacctctacg gcctgaccga |
| 2641 | agccatcgcc tcccacaggg cgctggtgaa ggctcggggg acacgcccat ttgtgatctc |
| 2701 | ccgctcgacc tttgctggcc acggccgata cgccggccac tggacggggg acgtgtggag |
| 2761 | ctcctgggag cagctcgcct cctccgtgcc agaaatcctg cagtttaacc tgctgggggt |
| 2821 | gcctctggtc ggggccgacg tctgcggctt cctgggcaac acctcagagg agctgtgtgt |
| 2881 | gcgctggacc cagctggggg ccttctaccc cttcatgcgg aaccacaaca gcctgctcag |
| 2941 | tctgccccag gagccgtaca gcttcagcga gccggcccag caggccatga ggaaggccct |
| 3001 | caccctgcgc tacgcactcc tcccccacct ctacacactg ttccaccagg cccacgtcgc |
| 3061 | gggggagacc gtggcccggc ccctcttcct ggagttcccc aaggactcta gcacctggac |
| 3121 | tgtggaccac cagctcctgt ggggggaggc cctgctcatc accccagtgc tccaggccgg |
| 3181 | gaaggccgaa gtgactggct acttcccctt gggcacatgg tacgacctgc agacggtgcc |
| 3241 | aatagaggcc cttggcagcc tcccaccccc acctgcagct ccccgtgagc cagccatcca |
| 3301 | cagcgagggg cagtgggtga cgctgccggc ccccctggac accatcaacg tccacctccg |
| 3361 | ggctgggtac atcatccccc tgcagggccc tggcctcaca accacagagt cccgccagca |
| 3421 | gcccatggcc ctggctgtgg ccctgaccaa gggtggagag gcccgagggg agctgttctg |
| 3481 | ggacgatgga gagagcctgg aagtgctgga gcgaggggcc tacacacagg tcatcttcct |
| 3541 | ggccaggaat aacacgatcg tgaatgagct ggtacgtgtg accagtgagg gagctggcct |
| 3601 | gcagctgcag aaggtgactg tcctgggcgt ggccacggcg ccccagcagg tcctctccaa |
| 3661 | cggtgtccct gtctccaact tcacctacag ccccgacacc aaggtcctgg acatctgtgt |
| 3721 | ctcgctgttg atgggagagc agtttctcgt cagctggtgt tagccgggcg gagtgtgtta |
| 3781 | gtctctccag agggaggctg gttccccagg gaagcagagc ctgtgtgcgg gcagcagctg |
| 3841 | tgtgcgggcc tgggggttgt taagtgcaat tatttttaat aaaaggggca tttggaaaaa |
| 3901 | aaaaaaaaag gtagcagtcg acagatgaat tctgcagatc tgtggcttct agctgcccgg |
| 3961 | gtggcatccc tgtgacccct ccccagtgcc tctcctggcc ctggaagttg ccactccagt |
| 4021 | gcccaccagc cttgtcctaa taaaattaag ttgcatcatt ttgtctgact aggtgtcctt |
| 4081 | ctataatatt atggggtgga ggggggtggt atggagcaag gggcaagttg ggaagacaac |
| 4141 | ctgagttgtt gggattccag gcatcgagta gataagtagc atggcgggtt aatcattaac |
| 4201 | tacaaggaac ccctagtgat ggagttggcc actccctctc tgcgcgctcg ctcgctcact |
| 4261 | gaggccgggc gaccaaaggt cgcccgacgc ccgggctttg cccgggcggc ctcagtgagc |
| 4321 | gagcgagcgc gcagagaggg acagatccga agccgggcaa atcagcgcct ggcagcagtg |
| 4381 | gcgtctggcg gaaaacctca gtgtgacgct ccccgccgcg tcccacgctt gttcccggat |
| 4441 | ctgaccacca gcgaaatccg atttttgcac cgagctgggt aataagcgtt ggcaatttaa |
| 4501 | ccgccagtca ggctttcttt cacagtgtgg attggcgata aaaaacaact gctgacgccg |
| 4561 | ctgcgcgatc agttcacccg ttcaccgctg gataacgact tggcgtaagt gaagcgaccc |
| 4621 | gtaagaccct aacgcctggg tcgaacgctg gaaggcggcg ggccaaacca ggccgaagca |
| 4681 | gcgttgttgc agttcacggc agatacactt gctgttgcgg tgctgattac gaccgctcac |
| 4741 | tcgtggcagc aacaggggaa aaccttattt atcagccgga aaacctaccg gattgttggt |
| 4801 | agtggtcaat aggcgattac cgttgtgttg aagtggcgag cgatacaccg cttccggcgc |
| 4861 | ggattggcct gaactgccaa ctggcgcagg tagcagagcg ggtaaactgg ctcggattag |
| 4921 | ggccgcaaga aaactatccc gaccgcctta ctgccgcctg ttttgaccgc tgggatctgc |
| 4981 | caagtcagac agtatagccc gtacgtcttc ccgagcgaaa acggtctgcg ctgcgggacg |
| 5041 | cgcgaattga atttggccca caccagtggc gcggcgactt ccagttcaat atcagccgct |
| 5101 | acagtgaaca gcaactgttg gaaaccagcc ttcgccaact gctgcacgcg gaagaaggca |
| 5161 | ctggctgaat atcgacggtt tccagttggg gattggtggc gacgactcct ggagcccgtc |
| 5221 | agtatcggcg gacttccaac tgagcgccgg tcgctacctt accagttggt ctggtgtcaa |
| 5281 | aaagcgtccg cttgagtcta gcgatcgcgc gcagatctgt catgtgagca aaaggccagc |
| 5341 | aaaaggccag gaaccgtaaa aaggccgcgt tgctggcgtt tttccatagg ctccgccccc |
| 5401 | ctgacgagca tcacaaaaat cgacgctcaa gtcagaggtg gcgaaacccg acaggactat |
| 5461 | aaagatacca ggcgtttccc cctggaagct ccctcgtgcg ctctcctgtt ccgaccctgc |
| 5521 | cgcttaccgg atacctgtcc gcctttctcc cttcgggaag cgtggcgctt tctcatagct |
| 5581 | cacgctgtag gtatctcagt tcggtgtagg tcgttcgctc caagctgggc tgtgtgcacg |
| 5641 | aaccccccgt tcagcccgac cgctgcgcct tatccggtaa ctatcgtctt gagtccaacc |
| 5701 | cggtaagaca cgacttatcg ccactggcag cagccactgg taacaggatt agcagagcga |
| 5761 | ggtatgtagg cggtgctaca gagttcttga agtggtggcc taactacggc tacactagaa |
| 5821 | gaacagtatt tggtatctgc gctctgctga agccagttac cttcggaaaa agagttggta |
| 5881 | gctcttgatc cggcaaacaa accaccgctg gtagcggtgg tttttttgtt tgcaagcagc |
| 5941 | agattacgcg cagaaaaaaa ggatctcaag aagatccttt gatcttttct acggggtctg |
| 6001 | acgctcagtg gaacgaaaac tcacgttaag ggattttggt catgagatta tcaaaaagga |
| 6061 | tcttcaccta gatccttttc acgtagaaag ccagtccgca gaaacggtgc tgaccccgga |
| 6121 | tgaatgtcag ctactgggct atctggacaa gggaaaacgc aagcgcaaag agaaagcagg |
| 6181 | tagcttgcag tgggcttaca tggcgatagc tagactgggc ggttttatgg acagcaagcg |
| 6241 | aaccggaatt gccagctggg gcgccctctg gtaaggttgg gaagccctgc aaagtaaact |
| 6301 | ggatggcttt cttgccgcca aggatctgat ggcgcagggg atcaagatct gatcaagaga |
| 6361 | caggatgagg atcgtttcgc atgattgaac aagatggatt gcacgcaggt tctccggccg |
| 6421 | cttgggtgga gaggctattc ggctatgact gggcacaaca gacaatcggc tgctctgatg |
| 6481 | ccgccgtgtt ccggctgtca gcgcaggggc gcccggttct ttttgtcaag accgacctgt |
| 6541 | ccggtgccct gaatgaactg caagacgagg cagcgcggct atcgtggctg gccacgacgg |
| 6601 | gcgttccttg cgcagctgtg ctcgacgttg tcactgaagc gggaagggac tggctgctat |
| 6661 | tgggcgaagt gccggggcag gatctcctgt catctcacct tgctcctgcc gagaaagtat |
| 6721 | ccatcatggc tgatgcaatg cggcggctgc atacgcttga tccggctacc tgcccattcg |
| 6781 | accaccaagc gaaacatcgc atcgagcgag cacgtactcg gatggaagcc ggtcttgtcg |
| 6841 | atcaggatga tctggacgaa gagcatcagg ggctcgcgcc agccgaactg ttcgccaggc |
| 6901 | tcaaggcgag catgcccgac ggcgaggatc tcgtcgtgac ccatggcgat gcctgcttgc |
| 6961 | cgaatatcat ggtggaaaat ggccgctttt ctggattcat cgactgtggc cggctgggtg |
| 7021 | tggcggaccg ctatcaggac atagcgttgg ctacccgtga tattgctgaa gagcttggcg |
| 7081 | gcgaatgggc tgaccgcttc ctcgtgcttt acggtatcgc cgctcccgat tcgcagcgca |
| 7141 | tcgccttcta tcgccttctt gacgagttct tctgaattta aagcccaata cgcaaaccgc |
| 7201 | ctctccccgc gcgttggccg aagcggttca atattttgtt aaaattcgcg ttaaattttt |
| 7261 | gttaaatcag ctatttttta accaataggc cgaaatcggc aaaatccctt gtaaatcaaa |
| 7321 | agaatagacc gagatagggt tgagtgttgt tccagtttgg aacaagagtc cactattaaa |
| 7381 | gaacgtggac tccaacgtca aagggcgaaa aaccgtctat cagggcgttg gcccactacg |
| 7441 | tgaaccttca ccctaatcaa gttttttggg gtcgaggtgc cgtaaagcac taaatcggaa |
| 7501 | ccctaaaggg agcccccgat ttagagcttg acggggaaac cggcgaacgt ggcgagaaag |
| 7561 | gaagggaaga aagcgaaagg agcgggcgct agggcgctgg caagtgtagc ggtcacgctg |
| 7621 | cgcgtaacca ccacacccgc cgcgctaagc gccgctacag ggcgcgtccc ttcgccttca |
| 7681 | ggctgcgtcg agtactgtac tgtgagccag agttgcccgg cgctctccgg ctgcggtagt |
| 7741 | tcaggcagtt caatcaactg tttaccttgt ggagcgactc cagaggcact tcaccgcttg |
| 7801 | ccagcggctt acgatccagc gccacgatcc agtgcaggag atcgttatcg ctatacggaa |
| 7861 | caggtattcg ctggtcactt cgataaggtt tgcccggata aacggaactg gaaaaactgc |
| 7921 | tgctggtgtt ttgcttccgt cagtgctgga tcggcgtgcg gtcggcaaag accagaccgt |
| 7981 | tctaacagaa ctggcgattg ttcggcgtat cgccaaaatc accgccgtaa gccgaccacg |
| 8041 | ggttgccgtt ttcagcagga tttaatcagc gactgatcca cccagtccca gacgaagccg |
| 8101 | ccctgtaaac ggggatactg acgaaacgcc tgccagtatt tagcgaaacc gccaagactg |
| 8161 | ttacccaagc gtgggcgtat tcgcaaagga tcagcgggcg cgtctctcca ggtagcgaaa |
| 8221 | gccttttttg atcgaccttt cggcacagcc gggaagggct ggtcttcaac cacgcgcgcg |
| 8281 | tacaacgggc aaataatatc ggtggccgtg gtgtcggctc cgccgccttc aactgcaccg |
| 8341 | ggcgggaagg atcgacagat ttgatccagc gatacagcgc gtcgtgatta gcgccgtggc |
| 8401 | ctgattcaat tccccagcga ccagtagatc acactcgggt gattacgatt gcgctgcacc |
| 8461 | agtcgcgtta cggttcgctc ttcgccggta gccagcgcgg atcacggtca gacgattcgt |
| 8521 | tggcacgatc cgtgggtttc aatactggct tcaaaccacc actaacaggc cgtagcggtc |
| 8581 | gcacagcgtg taccacagcg gttggttcgg ataatcgaac agcgcacggc gttaaagttg |
| 8641 | ttctgcttca acagcaggat attctgcacc ttcgtctgct cttcctaacc tgaccaagca |
| 8701 | gaggatctgc tcgtgacggt taatcctcga atcagcaacg gcttgccgtt cagcagcagc |
| 8761 | agaccaagtt caatccgcac ctcgcggaaa ccgacaacgc aggcttctgc ttcaatcagc |
| 8821 | gtgccgtcgg cggtgtgcag ttcaaccacc gcacgataga gattcgggat ttcggcgctc |
| 8881 | cacagtttcg ggttttcgac gttcagacgt agtgtgacgc gatctgcaaa ccaccacgct |
| 8941 | caacgataat ttcaccgccg aaaggcgcgg tgccgctggc gacctgcgtt tcaccctgcc |
| 9001 | agaaagaaac tgttacccgt aggtagtcac gcaactcgcc gcacactgaa cttcagcctc |
| 9061 | cagtacagcg cggctgaaat cgtcttaaag cgagtggcaa ctggaaatcg ctgatttgtg |
| 9121 | tagtcggttt agcagcaacg agacttcacg gaaaatccgc taatccgcca cagatcctga |
| 9181 | tcttccagat aactgccgtc actccaacgc agcaccttca ccgcgaggcg gttttctccg |
| 9241 | gcgcgtaaaa atcgctcagg tcaaattcag acggcaaacg actgtcctgg ccgtaaccga |
| 9301 | cccagcgccc gttgcaccac agattgaaac gccgagttta cgcctcaaaa ataattcgcg |
| 9361 | tctggccttc ctgtagccag ctttcacaac tataatagtg agcgagtaac aacccgtcgg |
| 9421 | attctccgtg ggaacaaacg gcggattgac cgtataggga taggttacgt tggtgtagta |
| 9481 | gggcgctccg taaccgtgct actgccagtt tgaggggacg acgacagtat cggcctcagg |
| 9541 | aagatcgcac tccagccagc tttccggcac cgcttctggt actggaaacc aggcaaagcg |
| 9601 | cctatcgcct atcaggctgc acaactgttg ggaagggcga tctgtgcggg cctcttcgct |
| 9661 | attacgccag cttgcgaaag ggggtagtgc tgcaaggcga ttaagttggg taacgccagg |
| 9721 | gttttcccag tcacgacgtg gatctgggcc actccctct |

| pP150 (SEQ ID NO: 507) | |
|---|---|
| (SEQ ID NO: 507) | |
| 1 | ctgcgcgctc gctcgctcac tgaggccgcc cgggcaaagc ccgggcgtcg ggcgaccttt |
| 61 | ggtcgcccgg cctcagtgag cgagcgagcg cgcagagagg gagtggccaa ctccatcact |
| 121 | aggggttcct ggaggggtgg agtcgtgacg tgaattacgt catagggtta gggaggtcgg |
| 181 | ccgctctagg agttaatttt taaaaagcag tcaaaagtcc aagtgccctt gcgagcattt |
| 241 | actctctctg tttgctctgg ttaataatct caggagcaca aacattcctt actagttcta |
| 301 | ggagttaatt tttaaaaagc agtcaaaagt ccaagtgccc ttgcgagcat ttactctctc |
| 361 | tgtttgctct ggttaataat ctcaggagca caaacattcc ttactagttc tagagcggcc |
| 421 | gccagtgtgc tggaattcgg cttttttagg gctggaagct acctttgaca tcatttcctc |
| 481 | tgcgaatgca tgtataattt ctacagaacc tattagaaag gatcacccag cctctgcttt |
| 541 | tgtacaactt tcccttaaaa aactgccaat cccactgctg tttggcccaa tagtgagaac |
| 601 | tttttcctgc tgcctcttgg tgcttttgcc tatggcccct attctgcctg ctgaagacac |
| 661 | tcttgccagc atggacttaa acccctccag ctctgacaat cctctttctc ttttgtttta |
| 721 | catgaagggt ctggcagcca aagcaatcac tcaaagttca aaccttatca ttttttgctt |
| 781 | tgttcctctt ggccttggtt ttgtacatca gctttgaaaa taccatccca gggttaatgc |
| 841 | tggggttaat ttataactga gagtgctcta gttctgcaat acaggacatg ctataaaaat |
| 901 | ggaaagatgt tgctttctga gagatcagct tacatgtggt accgagctcg gatccactag |
| 961 | taacggccgc cagtgtgctg gaattcggct ttccaggcca tcttttttta tgggagtgag |
| 1021 | gcacccgccc tgctcccacc ggctcctggc cgtctgcgcc ctcgtgtcct tggcaaccgc |
| 1081 | catggagttt gggctgagct gggtctttct ggtggccctg ctgaagggag tccagtgtga |
| 1141 | gcagcaggga gccagcagac cagggccccg ggatgcccag gcacaccccg gccgtcccag |
| 1201 | agcagtgccc acacagtgcg acgtcccccc caacagccgc ttcgattgcg cccctgacaa |
| 1261 | ggccatcacc caggaacagt gcgaggcccg cggctgctgc tacatccctg caaagcaggg |
| 1321 | gctgcaggga gcccagatgg ggcagccctg gtgcttcttc ccacccagct accccagcta |
| 1381 | caagctggag aacctgagct cctctgaaat gggctacacg gccaccctga cccgtaccac |
| 1441 | ccccaccttc ttccccaagg acatcctgac cctgcggctg gacgtgatga tggagactga |
| 1501 | gaaccgcctc cacttcacga tcaaagatcc agctaacagg cgctacgagg tgcccttgga |
| 1561 | gaccccgcgt gtccacagcc gggcaccgtc cccactctac agcgtggagt tctccgagga |
| 1621 | gcccttcggg gtgatcgtgc accggcagct ggacggccgc gtgctgctga acacgacggt |
| 1681 | ggcgcccctg ttctttgcgg accagttcct tcagctgtcc acctcgctgc cctcgcagta |
| 1741 | tatcacaggc ctcgccgagc acctcagtcc cctgatgctc agcaccagct ggaccaggat |
| 1801 | caccctgtgg aaccgggacc ttgcgcccac gcccggtgcg aacctctacg ggtctcaccc |
| 1861 | tttctacctg gcgctggagg acggcgggtc ggcacacggg gtgttcctgc taaacagcaa |
| 1921 | tgccatggat gtggtcctgc agccgagccc tgcccttagc tggaggtcga caggtgggat |
| 1981 | cctggatgtc tacatcttcc tgggcccaga gcccaagagc gtggtgcagc agtacctgga |
| 2041 | cgttgtggga tacccgttca tgccgccata ctggggcctg ggcttccacc tgtgccgctg |
| 2101 | gggctactcc tccaccgcta tcacccgcca ggtggtggag aacatgacca gggcccactt |
| 2161 | ccccctggac gtccaatgga acgacctgga ctacatggac tcccggaggg acttcacgtt |
| 2221 | caacaaggat ggcttccggg acttcccggc catggtgcag gagctgcacc agggcggccg |
| 2281 | gcgctacatg atgatcgtgg atcctgccat cagcagctcg ggccctgccg ggagctacag |
| 2341 | gccctacgac gagggtctgc ggaggggggt tttcatcacc aacgagaccg gccagccgct |
| 2401 | gattgggaag gtatggcccg ggtccactgc cttccccgac ttcaccaacc ccacagccct |
| 2461 | ggcctggtgg gaggacatgg tggctgagtt ccatgaccag gtgcccttcg acggcatgtg |
| 2521 | gattgacatg aacgagcctt ccaacttcat cagaggctct gaggacggct gccccaacaa |
| 2581 | tgagctggag aacccaccct acgtgcctgg ggtggttggg gggaccctcc aggcggccac |
| 2641 | catctgtgcc tccagccacc agtttctctc cacacactac aacctgcaca acctctacgg |
| 2701 | cctgaccgaa gccatcgcct cccacagggc gctggtgaag gctcggggga cacgcccatt |
| 2761 | tgtgatctcc cgctcgacct ttgctggcca cggccgatac gccggccact ggacggggga |
| 2821 | cgtgtggagc tcctgggagc agctcgcctc ctccgtgcca gaaatcctgc agtttaacct |
| 2881 | gctgggggtg cctctggtcg gggccgacgt ctgcggcttc ctgggcaaca cctcagagga |
| 2941 | gctgtgtgtg cgctggaccc agctgggggc cttctacccc ttcatgcgga accacaacag |
| 3001 | cctgctcagt ctgccccagg agccgtacag cttcagcgag ccggcccagc aggccatgag |
| 3061 | gaaggccctc accctgcgct acgcactcct cccccacctc tacacactgt tccaccaggc |
| 3121 | ccacgtcgcg ggggagaccg tggcccggcc cctcttcctg gagttcccca aggactctag |
| 3181 | cacctggact gtggaccacc agctcctgtg gggggaggcc ctgctcatca ccccagtgct |
| 3241 | ccaggccggg aaggccgaag tgactggcta cttccccttg ggcacatggt acgacctgca |
| 3301 | gacggtgcca atagaggccc ttggcagcct cccaccccca cctgcagctc cccgtgagcc |
| 3361 | agccatccac agcgaggggc agtgggtgac gctgccggcc cccctggaca ccatcaacgt |
| 3421 | ccacctccgg gctgggtaca tcatccccct gcagggccct ggcctcacaa ccacagagtc |
| 3481 | ccgccagcag cccatggccc tggctgtggc cctgaccaag ggtggagagg cccgagggga |
| 3541 | gctgttctgg gacgatggag agagcctgga agtgctggag cgaggggcct acacacaggt |
| 3601 | catcttcctg gccaggaata acacgatcgt gaatgagctg gtacgtgtga ccagtgaggg |
| 3661 | agctggcctg cagctgcaga aggtgactgt cctgggcgtg gccacggcgc cccagcaggt |
| 3721 | cctctccaac ggtgtccctg tctccaactt cacctacagc cccgacacca aggtcctgga |
| 3781 | catctgtgtc tcgctgttga tgggagagca gtttctcgtc agctggtgtt agccgggcgg |
| 3841 | agtgtgttag tctctccaga gggaggctgg ttccccaggg aagcagagcc tgtgtgcggg |
| 3901 | cagcagctgt gtgcgggcct gggggttgtt aagtgcaatt atttttaata aaaggggcat |
| 3961 | ttggaaaaaa aaaaaaaagg tagcagtcga cagatgaatt ctgcagatct gtggcttcta |
| 4021 | gctgcccggg tggcatccct gtgacccctc cccagtgcct ctcctggccc tggaagttgc |
| 4081 | cactccagtg cccaccagcc ttgtcctaat aaaattaagt tgcatcattt tgtctgacta |
| 4141 | ggtgtccttc tataatatta tggggtggag gggggtggta tggagcaagg ggcaagttgg |
| 4201 | gaagacaacc tgagttgttg ggattccagg catcgagtag ataagtagca tggcgggtta |
| 4261 | atcattaact acaaggaacc cctagtgatg gagttggcca ctccctctct gcgcgctcgc |
| 4321 | tcgctcactg aggccgggcg accaaaggtc gcccgacgcc cgggctttgc ccgggcggcc |
| 4381 | tcagtgagcg agcgagcgcg cagagaggga cagatccgaa gccgggcaaa tcagcgcctg |
| 4441 | gcagcagtgg cgtctggcgg aaaacctcag tgtgacgctc cccgccgcgt cccacgcttg |
| 4501 | ttcccggatc tgaccaccag cgaaatccga tttttgcacc gagctgggta ataagcgttg |
| 4561 | gcaatttaac cgccagtcag gctttctttc acagtgtgga ttggcgataa aaaacaactg |
| 4621 | ctgacgccgc tgcgcgatca gttcacccgt tcaccgctgg ataacgactt ggcgtaagtg |
| 4681 | aagcgacccg taagacccta acgcctgggt cgaacgctgg aaggcggcgg gccaaaccag |
| 4741 | gccgaagcag cgttgttgca gttcacggca gatacacttg ctgttgcggt gctgattacg |
| 4801 | accgctcact cgtggcagca acaggggaaa accttattta tcagccggaa aacctaccgg |
| 4861 | attgttggta gtggtcaata ggcgattacc gttgtgttga agtggcgagc gatacaccgc |
| 4921 | ttccggcgcg gattggcctg aactgccaac tggcgcaggt agcagagcgg gtaaactggc |
| 4981 | tcggattagg gccgcaagaa aactatcccg accgccttac tgccgcctgt tttgaccgct |
| 5041 | gggatctgcc aagtcagaca gtatagcccg tacgtcttcc cgagcgaaaa cggtctgcgc |
| 5101 | tgcgggacgc gcgaattgaa tttggcccac accagtggcg cggcgacttc cagttcaata |
| 5161 | tcagccgcta cagtgaacag caactgttgg aaaccagcct tcgccaactg ctgcacgcgg |
| 5221 | aagaaggcac tggctgaata tcgacggttt ccagttgggg attggtggcg acgactcctg |
| 5281 | gagcccgtca gtatcggcgg acttccaact gagcgccggt cgctacctta ccagttggtc |
| 5341 | tggtgtcaaa aagcgtccgc ttgagtctag cgatcgcgcg cagatctgtc atgtgagcaa |
| 5401 | aaggccagca aaaggccagg aaccgtaaaa aggccgcgtt gctggcgttt ttccataggc |
| 5461 | tccgcccccc tgacgagcat cacaaaaatc gacgctcaag tcagaggtgg cgaaacccga |
| 5521 | caggactata aagataccag gcgtttcccc ctggaagctc cctcgtgcgc tctcctgttc |
| 5581 | cgaccctgcc gcttaccgga tacctgtccg cctttctccc ttcgggaagc gtggcgcttt |
| 5641 | ctcatagctc acgctgtagg tatctcagtt cggtgtaggt cgttcgctcc aagctgggct |
| 5701 | gtgtgcacga accccccgtt cagcccgacc gctgcgcctt atccggtaac tatcgtcttg |
| 5761 | agtccaaccc ggtaagacac gacttatcgc cactggcagc agccactggt aacaggatta |
| 5821 | gcagagcgag gtatgtaggc ggtgctacag agttcttgaa gtggtggcct aactacggct |
| 5881 | acactagaag aacagtattt ggtatctgcg ctctgctgaa gccagttacc ttcggaaaaa |
| 5941 | gagttggtag ctcttgatcc ggcaaacaaa ccaccgctgg tagcggtggt ttttttgttt |
| 6001 | gcaagcagca gattacgcgc agaaaaaaag gatctcaaga agatcctttg atcttttcta |
| 6061 | cggggtctga cgctcagtgg aacgaaaact cacgttaagg gattttggtc atgagattat |
| 6121 | caaaaaggat cttcacctag atccttttca cgtagaaagc cagtccgcag aaacggtgct |
| 6181 | gaccccggat gaatgtcagc tactgggcta tctggacaag ggaaaacgca agcgcaaaga |
| 6241 | gaaagcaggt agcttgcagt gggcttacat ggcgatagct agactgggcg gttttatgga |
| 6301 | cagcaagcga accggaattg ccagctgggg cgccctctgg taaggttggg aagccctgca |
| 6361 | aagtaaactg gatggctttc ttgccgccaa ggatctgatg gcgcagggga tcaagatctg |
| 6421 | atcaagagac aggatgagga tcgtttcgca tgattgaaca agatggattg cacgcaggtt |
| 6481 | ctccggccgc ttgggtggag aggctattcg gctatgactg ggcacaacag acaatcggct |
| 6541 | gctctgatgc cgccgtgttc cggctgtcag cgcaggggcg cccggttctt tttgtcaaga |
| 6601 | ccgacctgtc cggtgccctg aatgaactgc aagacgaggc agcgcggcta tcgtggctgg |
| 6661 | ccacgacggg cgttccttgc gcagctgtgc tcgacgttgt cactgaagcg ggaagggact |
| 6721 | ggctgctatt gggcgaagtg ccggggcagg atctcctgtc atctcacctt gctcctgccg |
| 6781 | agaaagtatc catcatggct gatgcaatgc ggcggctgca tacgcttgat ccggctacct |
| 6841 | gcccattcga ccaccaagcg aaacatcgca tcgagcgagc acgtactcgg atggaagccg |
| 6901 | gtcttgtcga tcaggatgat ctggacgaag agcatcaggg gctcgcgcca gccgaactgt |
| 6961 | tcgccaggct caaggcgagc atgcccgacg gcgaggatct cgtcgtgacc catggcgatg |
| 7021 | cctgcttgcc gaatatcatg gtggaaaatg gccgcttttc tggattcatc gactgtggcc |
| 7081 | ggctgggtgt ggcggaccgc tatcaggaca tagcgttggc tacccgtgat attgctgaag |
| 7141 | agcttggcgg cgaatgggct gaccgcttcc tcgtgcttta cggtatcgcc gctcccgatt |
| 7201 | cgcagcgcat cgccttctat cgccttcttg acgagttctt ctgaatttaa agcccaatac |
| 7261 | gcaaaccgcc tctccccgcg cgttggccga agcggttcaa tattttgtta aaattcgcgt |
| 7321 | taaatttttg ttaaatcagc tattttttaa ccaataggcc gaaatcggca aaatcccttg |
| 7381 | taaatcaaaa gaatagaccg agatagggtt gagtgttgtt ccagtttgga acaagagtcc |
| 7441 | actattaaag aacgtggact ccaacgtcaa agggcgaaaa accgtctatc agggcgttgg |
| 7501 | cccactacgt gaaccttcac cctaatcaag ttttttgggg tcgaggtgcc gtaaagcact |
| 7561 | aaatcggaac cctaaaggga gcccccgatt tagagcttga cggggaaacc ggcgaacgtg |
| 7621 | gcgagaaagg aagggaagaa agcgaaagga gcgggcgcta gggcgctggc aagtgtagcg |
| 7681 | gtcacgctgc gcgtaaccac cacacccgcc gcgctaagcg ccgctacagg gcgcgtccct |
| 7741 | tcgccttcag gctgcgtcga gtactgtact gtgagccaga gttgcccggc gctctccggc |
| 7801 | tgcggtagtt caggcagttc aatcaactgt ttaccttgtg gagcgactcc agaggcactt |
| 7861 | caccgcttgc cagcggctta cgatccagcg ccacgatcca gtgcaggaga tcgttatcgc |
| 7921 | tatacggaac aggtattcgc tggtcacttc gataaggttt gcccggataa acggaactgg |
| 7981 | aaaaactgct gctggtgttt tgcttccgtc agtgctggat cggcgtgcgg tcggcaaaga |
| 8041 | ccagaccgtt ctaacagaac tggcgattgt tcggcgtatc gccaaaatca ccgccgtaag |
| 8101 | ccgaccacgg gttgccgttt tcagcaggat ttaatcagcg actgatccac ccagtcccag |
| 8161 | acgaagccgc cctgtaaacg gggatactga cgaaacgcct gccagtattt agcgaaaccg |
| 8221 | ccaagactgt tacccaagcg tgggcgtatt cgcaaaggat cagcgggcgc gtctctccag |
| 8281 | gtagcgaaag ccttttttga tcgacctttc ggcacagccg ggaagggctg gtcttcaacc |
| 8341 | acgcgcgcgt acaacgggca aataatatcg gtggccgtgg tgtcggctcc gccgccttca |
| 8401 | actgcaccgg gcgggaagga tcgacagatt tgatccagcg atacagcgcg tcgtgattag |
| 8461 | cgccgtggcc tgattcaatt ccccagcgac cagtagatca cactcgggtg attacgattg |
| 8521 | cgctgcacca gtcgcgttac ggttcgctct tcgccggtag ccagcgcgga tcacggtcag |
| 8581 | acgattcgtt ggcacgatcc gtgggtttca atactggctt caaaccacca ctaacaggcc |
| 8641 | gtagcggtcg cacagcgtgt accacagcgg ttggttcgga taatcgaaca gcgcacggcg |
| 8701 | ttaaagttgt tctgcttcaa cagcaggata ttctgcacct tcgtctgctc ttcctaacct |
| 8761 | gaccaagcag aggatctgct cgtgacggtt aatcctcgaa tcagcaacgg cttgccgttc |
| 8821 | agcagcagca gaccaagttc aatccgcacc tcgcggaaac cgacaacgca ggcttctgct |
| 8881 | tcaatcagcg tgccgtcggc ggtgtgcagt tcaaccaccg cacgatagag attcgggatt |
| 8941 | tcggcgctcc acagtttcgg gttttcgacg ttcagacgta gtgtgacgcg atctgcaaac |
| 9001 | caccacgctc aacgataatt tcaccgccga aaggcgcggt gccgctggcg acctgcgttt |
| 9061 | caccctgcca gaaagaaact gttacccgta ggtagtcacg caactcgccg cacactgaac |
| 9121 | ttcagcctcc agtacagcgc ggctgaaatc gtcttaaagc gagtggcaac tggaaatcgc |
| 9181 | tgatttgtgt agtcggttta gcagcaacga gacttcacgg aaaatccgct aatccgccac |
| 9241 | agatcctgat cttccagata actgccgtca ctccaacgca gcaccttcac cgcgaggcgg |
| 9301 | ttttctccgg cgcgtaaaaa tcgctcaggt caaattcaga cggcaaacga ctgtcctggc |
| 9361 | cgtaaccgac ccagcgcccg ttgcaccaca gattgaaacg ccgagtttac gcctcaaaaa |
| 9421 | taattcgcgt ctggccttcc tgtagccagc tttcacaact ataatagtga gcgagtaaca |
| 9481 | acccgtcgga ttctccgtgg gaacaaacgg cggattgacc gtatagggat aggttacgtt |
| 9541 | ggtgtagtag ggcgctccgt aaccgtgcta ctgccagttt gaggggacga cgacagtatc |
| 9601 | ggcctcagga agatcgcact ccagccagct ttccggcacc gcttctggta ctggaaacca |
| 9661 | ggcaaagcgc ctatcgccta tcaggctgca caactgttgg gaagggcgat ctgtgcgggc |
| 9721 | ctcttcgcta ttacgccagc ttgcgaaagg gggtagtgct gcaaggcgat taagttgggt |
| 9781 | aacgccaggg ttttcccagt cacgacgtgg atctgggcca ctccctct |

| pP151? (SEQ ID NO: 508) | |
|---|---|
| (SEQ ID NO: 508) | |
| 1 | ctgcgcgctc gctcgctcac tgaggccgcc cgggcaaagc ccgggcgtcg ggcgaccttt |
| 61 | ggtcgcccgg cctcagtgag cgagcgagcg cgcagagagg gagtggccaa ctccatcact |
| 121 | aggggttcct ggaggggtgg agtcgtgacg tgaattacgt catagggtta gggaggtcgg |
| 181 | ccgctctagg agttaatttt taaaaagcag tcaaaagtcc aagtgccctt gcgagcattt |
| 241 | actctctctg tttgctctgg ttaataatct caggagcaca aacattcctt actagttcta |
| 301 | ggagttaatt tttaaaaagc agtcaaaagt ccaagtgccc ttgcgagcat ttactctctc |
| 361 | tgtttgctct ggttaataat ctcaggagca caaacattcc ttactagttc tagagcggcc |
| 421 | gccagtgtgc tggaattcgg cttttttagg gctggaagct acctttgaca tcatttcctc |
| 481 | tgcgaatgca tgtataattt ctacagaacc tattagaaag gatcacccag cctctgcttt |
| 541 | tgtacaactt tcccttaaaa aactgccaat cccactgctg tttggcccaa tagtgagaac |
| 601 | tttttcctgc tgcctcttgg tgcttttgcc tatggcccct attctgcctg ctgaagacac |
| 661 | tcttgccagc atggacttaa acccctccag ctctgacaat cctctttctc ttttgtttta |
| 721 | catgaagggt ctggcagcca aagcaatcac tcaaagttca aaccttatca ttttttgctt |
| 781 | tgttcctctt ggccttggtt ttgtacatca gctttgaaaa taccatccca gggttaatgc |
| 841 | tggggttaat ttataactga gagtgctcta gttctgcaat acaggacatg ctataaaaat |
| 901 | ggaaagatgt tgctttctga gagatcaggt ggattcttgg gcatttgctt aagcttggta |
| 961 | ccttttttat gggagtgagg cacccgccct gctcccaccg gctcctggcc gtctgcgccc |
| 1021 | tcgtgtcctt ggcaaccgcc atggagtttg ggctgagctg ggtctttctg gtggccctgc |
| 1081 | tgaagggagt ccagtgtgag cagcagggag ccagcagacc agggccccgg gatgcccagg |
| 1141 | cacaccccgg ccgtcccaga gcagtgccca cacagtgcga cgtccccccc aacagccgct |
| 1201 | tcgattgcgc ccctgacaag gccatcaccc aggaacagtg cgaggcccgc ggctgctgct |
| 1261 | acatccctgc aaagcagggg ctgcagggag cccagatggg gcagccctgg tgcttcttcc |
| 1321 | cacccagcta ccccagctac aagctggaga acctgagctc ctctgaaatg ggctacacgg |
| 1381 | ccaccctgac ccgtaccacc cccaccttct tccccaagga catcctgacc ctgcggctgg |
| 1441 | acgtgatgat ggagactgag aaccgcctcc acttcacgat caaagatcca gctaacaggc |
| 1501 | gctacgaggt gcccttggag accccgcgtg tccacagccg ggcaccgtcc ccactctaca |
| 1561 | gcgtggagtt ctccgaggag cccttcgggg tgatcgtgca ccggcagctg gacggccgcg |
| 1621 | tgctgctgaa cacgacggtg gcgcccctgt tctttgcgga ccagttcctt cagctgtcca |
| 1681 | cctcgctgcc ctcgcagtat atcacaggcc tcgccgagca cctcagtccc ctgatgctca |
| 1741 | gcaccagctg gaccaggatc accctgtgga accgggacct tgcgcccacg cccggtgcga |
| 1801 | acctctacgg gtctcaccct ttctacctgg cgctggagga cggcgggtcg gcacacgggg |
| 1861 | tgttcctgct aaacagcaat gccatggatg tggtcctgca gccgagccct gcccttagct |
| 1921 | ggaggtcgac aggtgggatc ctggatgtct acatcttcct gggcccagag cccaagagcg |
| 1981 | tggtgcagca gtacctggac gttgtgggat acccgttcat gccgccatac tggggcctgg |
| 2041 | gcttccacct gtgccgctgg ggctactcct ccaccgctat cacccgccag gtggtggaga |
| 2101 | acatgaccag ggcccacttc cccctggacg tccaatggaa cgacctggac tacatggact |
| 2161 | cccggaggga cttcacgttc aacaaggatg gcttccggga cttcccggcc atggtgcagg |
| 2221 | agctgcacca gggcggccgg cgctacatga tgatcgtgga tcctgccatc agcagctcgg |
| 2281 | gccctgccgg gagctacagg ccctacgacg agggtctgcg gaggggggtt ttcatcacca |
| 2341 | acgagaccgg ccagccgctg attgggaagg tatggcccgg gtccactgcc ttccccgact |
| 2401 | tcaccaaccc cacagccctg gcctggtggg aggacatggt ggctgagttc catgaccagg |
| 2461 | tgcccttcga cggcatgtgg attgacatga acgagccttc caacttcatc agaggctctg |
| 2521 | aggacggctg ccccaacaat gagctggaga acccacccta cgtgcctggg gtggttgggg |
| 2581 | ggaccctcca ggcggccacc atctgtgcct ccagccacca gtttctctcc acacactaca |
| 2641 | acctgcacaa cctctacggc ctgaccgaag ccatcgcctc ccacagggcg ctggtgaagg |
| 2701 | ctcgggggac acgcccattt gtgatctccc gctcgacctt tgctggccac ggccgatacg |
| 2761 | ccggccactg gacgggggac gtgtggagct cctgggagca gctcgcctcc tccgtgccag |
| 2821 | aaatcctgca gtttaacctg ctgggggtgc ctctggtcgg ggccgacgtc tgcggcttcc |
| 2881 | tgggcaacac ctcagaggag ctgtgtgtgc gctggaccca gctgggggcc ttctacccct |
| 2941 | tcatgcggaa ccacaacagc ctgctcagtc tgccccagga gccgtacagc ttcagcgagc |
| 3001 | cggcccagca ggccatgagg aaggccctca ccctgcgcta cgcactcctc ccccacctct |
| 3061 | acacactgtt ccaccaggcc cacgtcgcgg gggagaccgt ggcccggccc ctcttcctgg |
| 3121 | agttccccaa ggactctagc acctggactg tggaccacca gctcctgtgg ggggaggccc |
| 3181 | tgctcatcac cccagtgctc caggccggga aggccgaagt gactggctac ttccccttgg |
| 3241 | gcacatggta cgacctgcag acggtgccaa tagaggccct tggcagcctc ccacccccac |
| 3301 | ctgcagctcc ccgtgagcca gccatccaca gcgaggggca gtgggtgacg ctgccggccc |
| 3361 | ccctggacac catcaacgtc cacctccggg ctgggtacat catccccctg cagggccctg |
| 3421 | gcctcacaac cacagagtcc cgccagcagc ccatggccct ggctgtggcc ctgaccaagg |
| 3481 | gtggagaggc ccgaggggag ctgttctggg acgatggaga gagcctggaa gtgctggagc |
| 3541 | gaggggccta cacacaggtc atcttcctgg ccaggaataa cacgatcgtg aatgagctgg |
| 3601 | tacgtgtgac cagtgaggga gctggcctgc agctgcagaa ggtgactgtc ctgggcgtgg |
| 3661 | ccacggcgcc ccagcaggtc ctctccaacg gtgtccctgt ctccaacttc acctacagcc |
| 3721 | ccgacaccaa ggtcctggac atctgtgtct cgctgttgat gggagagcag tttctcgtca |
| 3781 | gctggtgtta gccgggcgga gtgtgttagt ctctccagag ggaggctggt tccccaggga |
| 3841 | agcagagcct gtgtgcgggc agcagctgtg tgcgggcctg ggggttgtta agtgcaatta |
| 3901 | tttttaataa aaggggcatt tggaaaaaaa aaaaaaaggt agcagtcgac agatgaattc |
| 3961 | tgcagatctg tggcttctag ctgcccgggt ggcatccctg tgacccctcc ccagtgcctc |
| 4021 | tcctggccct ggaagttgcc actccagtgc ccaccagcct tgtcctaata aaattaagtt |
| 4081 | gcatcatttt gtctgactag gtgtccttct ataatattat ggggtggagg ggggtggtat |
| 4141 | ggagcaaggg gcaagttggg aagacaacct gagttgttgg gattccaggc atcgagtaga |
| 4201 | taagtagcat ggcgggttaa tcattaacta caaggaaccc ctagtgatgg agttggccac |
| 4261 | tccctctctg cgcgctcgct cgctcactga ggccgggcga ccaaaggtcg cccgacgccc |
| 4321 | gggctttgcc cgggcggcct cagtgagcga gcgagcgcgc agagagggac agatccgaag |
| 4381 | ccgggcaaat cagcgcctgg cagcagtggc gtctggcgga aaacctcagt gtgacgctcc |
| 4441 | ccgccgcgtc ccacgcttgt tcccggatct gaccaccagc gaaatccgat ttttgcaccg |
| 4501 | agctgggtaa taagcgttgg caatttaacc gccagtcagg ctttctttca cagtgtggat |
| 4561 | tggcgataaa aaacaactgc tgacgccgct gcgcgatcag ttcacccgtt caccgctgga |
| 4621 | taacgacttg gcgtaagtga agcgacccgt aagaccctaa cgcctgggtc gaacgctgga |
| 4681 | aggcggcggg ccaaaccagg ccgaagcagc gttgttgcag ttcacggcag atacacttgc |
| 4741 | tgttgcggtg ctgattacga ccgctcactc gtggcagcaa caggggaaaa ccttatttat |
| 4801 | cagccggaaa acctaccgga ttgttggtag tggtcaatag gcgattaccg ttgtgttgaa |
| 4861 | gtggcgagcg atacaccgct tccggcgcgg attggcctga actgccaact ggcgcaggta |
| 4921 | gcagagcggg taaactggct cggattaggg ccgcaagaaa actatcccga ccgccttact |
| 4981 | gccgcctgtt ttgaccgctg ggatctgcca agtcagacag tatagcccgt acgtcttccc |
| 5041 | gagcgaaaac ggtctgcgct gcgggacgcg cgaattgaat ttggcccaca ccagtggcgc |
| 5101 | ggcgacttcc agttcaatat cagccgctac agtgaacagc aactgttgga aaccagcctt |
| 5161 | cgccaactgc tgcacgcgga agaaggcact ggctgaatat cgacggtttc cagttgggga |
| 5221 | ttggtggcga cgactcctgg agcccgtcag tatcggcgga cttccaactg agcgccggtc |
| 5281 | gctaccttac cagttggtct ggtgtcaaaa agcgtccgct tgagtctagc gatcgcgcgc |
| 5341 | agatctgtca tgtgagcaaa aggccagcaa aaggccagga accgtaaaaa ggccgcgttg |
| 5401 | ctggcgtttt tccataggct ccgcccccct gacgagcatc acaaaaatcg acgctcaagt |
| 5461 | cagaggtggc gaaacccgac aggactataa agataccagg cgtttccccc tggaagctcc |
| 5521 | ctcgtgcgct ctcctgttcc gaccctgccg cttaccggat acctgtccgc ctttctccct |
| 5581 | tcgggaagcg tggcgctttc tcatagctca cgctgtaggt atctcagttc ggtgtaggtc |
| 5641 | gttcgctcca agctgggctg tgtgcacgaa ccccccgttc agcccgaccg ctgcgcctta |
| 5701 | tccggtaact atcgtcttga gtccaacccg gtaagacacg acttatcgcc actggcagca |
| 5761 | gccactggta acaggattag cagagcgagg tatgtaggcg gtgctacaga gttcttgaag |
| 5821 | tggtggccta actacggcta cactagaaga acagtatttg gtatctgcgc tctgctgaag |
| 5881 | ccagttacct tcggaaaaag agttggtagc tcttgatccg gcaaacaaac caccgctggt |
| 5941 | agcggtggtt tttttgtttg caagcagcag attacgcgca gaaaaaaagg atctcaagaa |
| 6001 | gatcctttga tcttttctac ggggtctgac gctcagtgga acgaaaactc acgttaaggg |
| 6061 | attttggtca tgagattatc aaaaaggatc ttcacctaga tccttttcac gtagaaagcc |
| 6121 | agtccgcaga aacggtgctg accccggatg aatgtcagct actgggctat ctggacaagg |
| 6181 | gaaaacgcaa gcgcaaagag aaagcaggta gcttgcagtg ggcttacatg gcgatagcta |
| 6241 | gactgggcgg ttttatggac agcaagcgaa ccggaattgc cagctggggc gccctctggt |
| 6301 | aaggttggga agccctgcaa agtaaactgg atggctttct tgccgccaag gatctgatgg |
| 6361 | cgcaggggat caagatctga tcaagagaca ggatgaggat cgtttcgcat gattgaacaa |
| 6421 | gatggattgc acgcaggttc tccggccgct tgggtggaga ggctattcgg ctatgactgg |
| 6481 | gcacaacaga caatcggctg ctctgatgcc gccgtgttcc ggctgtcagc gcaggggcgc |
| 6541 | ccggttcttt ttgtcaagac cgacctgtcc ggtgccctga atgaactgca agacgaggca |
| 6601 | gcgcggctat cgtggctggc cacgacgggc gttccttgcg cagctgtgct cgacgttgtc |
| 6661 | actgaagcgg gaagggactg gctgctattg ggcgaagtgc cggggcagga tctcctgtca |
| 6721 | tctcaccttg ctcctgccga gaaagtatcc atcatggctg atgcaatgcg gcggctgcat |
| 6781 | acgcttgatc cggctacctg cccattcgac caccaagcga aacatcgcat cgagcgagca |
| 6841 | cgtactcgga tggaagccgg tcttgtcgat caggatgatc tggacgaaga gcatcagggg |
| 6901 | ctcgcgccag ccgaactgtt cgccaggctc aaggcgagca tgcccgacgg cgaggatctc |
| 6961 | gtcgtgaccc atggcgatgc ctgcttgccg aatatcatgg tggaaaatgg ccgcttttct |
| 7021 | ggattcatcg actgtggccg gctgggtgtg gcggaccgct atcaggacat agcgttggct |
| 7081 | acccgtgata ttgctgaaga gcttggcggc gaatgggctg accgcttcct cgtgctttac |
| 7141 | ggtatcgccg ctcccgattc gcagcgcatc gccttctatc gccttcttga cgagttcttc |
| 7201 | tgaatttaaa gcccaatacg caaaccgcct ctccccgcgc gttggccgaa gcggttcaat |
| 7261 | attttgttaa aattcgcgtt aaatttttgt taaatcagct attttttaac caataggccg |
| 7321 | aaatcggcaa aatcccttgt aaatcaaaag aatagaccga gatagggttg agtgttgttc |
| 7381 | cagtttggaa caagagtcca ctattaaaga acgtggactc caacgtcaaa gggcgaaaaa |
| 7441 | ccgtctatca gggcgttggc ccactacgtg aaccttcacc ctaatcaagt tttttggggt |
| 7501 | cgaggtgccg taaagcacta aatcggaacc ctaaagggag cccccgattt agagcttgac |
| 7561 | ggggaaaccg gcgaacgtgg cgagaaagga agggaagaaa gcgaaaggag cgggcgctag |
| 7621 | ggcgctggca agtgtagcgg tcacgctgcg cgtaaccacc acacccgccg cgctaagcgc |
| 7681 | cgctacaggg cgcgtccctt cgccttcagg ctgcgtcgag tactgtactg tgagccagag |
| 7741 | ttgcccggcg ctctccggct gcggtagttc aggcagttca atcaactgtt taccttgtgg |
| 7801 | agcgactcca gaggcacttc accgcttgcc agcggcttac gatccagcgc cacgatccag |
| 7861 | tgcaggagat cgttatcgct atacggaaca ggtattcgct ggtcacttcg ataaggtttg |
| 7921 | cccggataaa cggaactgga aaaactgctg ctggtgtttt gcttccgtca gtgctggatc |
| 7981 | ggcgtgcggt cggcaaagac cagaccgttc taacagaact ggcgattgtt cggcgtatcg |
| 8041 | ccaaaatcac cgccgtaagc cgaccacggg ttgccgtttt cagcaggatt taatcagcga |
| 8101 | ctgatccacc cagtcccaga cgaagccgcc ctgtaaacgg ggatactgac gaaacgcctg |
| 8161 | ccagtattta gcgaaaccgc caagactgtt acccaagcgt gggcgtattc gcaaaggatc |
| 8221 | agcgggcgcg tctctccagg tagcgaaagc cttttttgat cgacctttcg gcacagccgg |
| 8281 | gaagggctgg tcttcaacca cgcgcgcgta caacgggcaa ataatatcgg tggccgtggt |
| 8341 | gtcggctccg ccgccttcaa ctgcaccggg cgggaaggat cgacagattt gatccagcga |
| 8401 | tacagcgcgt cgtgattagc gccgtggcct gattcaattc cccagcgacc agtagatcac |
| 8461 | actcgggtga ttacgattgc gctgcaccag tcgcgttacg gttcgctctt cgccggtagc |
| 8521 | cagcgcggat cacggtcaga cgattcgttg gcacgatccg tgggtttcaa tactggcttc |
| 8581 | aaaccaccac taacaggccg tagcggtcgc acagcgtgta ccacagcggt tggttcggat |
| 8641 | aatcgaacag cgcacggcgt taaagttgtt ctgcttcaac agcaggatat tctgcacctt |
| 8701 | cgtctgctct tcctaacctg accaagcaga ggatctgctc gtgacggtta atcctcgaat |
| 8761 | cagcaacggc ttgccgttca gcagcagcag accaagttca atccgcacct cgcggaaacc |
| 8821 | gacaacgcag gcttctgctt caatcagcgt gccgtcggcg gtgtgcagtt caaccaccgc |
| 8881 | acgatagaga ttcgggattt cggcgctcca cagtttcggg ttttcgacgt tcagacgtag |
| 8941 | tgtgacgcga tctgcaaacc accacgctca acgataattt caccgccgaa aggcgcggtg |
| 9001 | ccgctggcga cctgcgtttc accctgccag aaagaaactg ttacccgtag gtagtcacgc |
| 9061 | aactcgccgc acactgaact tcagcctcca gtacagcgcg gctgaaatcg tcttaaagcg |
| 9121 | agtggcaact ggaaatcgct gatttgtgta gtcggtttag cagcaacgag acttcacgga |
| 9181 | aaatccgcta atccgccaca gatcctgatc ttccagataa ctgccgtcac tccaacgcag |
| 9241 | caccttcacc gcgaggcggt tttctccggc gcgtaaaaat cgctcaggtc aaattcagac |
| 9301 | ggcaaacgac tgtcctggcc gtaaccgacc cagcgcccgt tgcaccacag attgaaacgc |
| 9361 | cgagtttacg cctcaaaaat aattcgcgtc tggccttcct gtagccagct ttcacaacta |
| 9421 | taatagtgag cgagtaacaa cccgtcggat tctccgtggg aacaaacggc ggattgaccg |
| 9481 | tatagggata ggttacgttg gtgtagtagg gcgctccgta accgtgctac tgccagtttg |
| 9541 | aggggacgac gacagtatcg gcctcaggaa gatcgcactc cagccagctt tccggcaccg |
| 9601 | cttctggtac tggaaaccag gcaaagcgcc tatcgcctat caggctgcac aactgttggg |
| 9661 | aagggcgatc tgtgcgggcc tcttcgctat tacgccagct tgcgaaaggg ggtagtgctg |
| 9721 | caaggcgatt aagttgggta acgccagggt tttcccagtc acgacgtgga tctgggccac |
| 9781 | tccctct |

| pP152 (SEQ ID NO: 509) | |
|---|---|
| (SEQ ID NO: 509) | |
| 1 | ctgcgcgctc gctcgctcac tgaggccgcc cgggcaaagc ccgggcgtcg ggcgaccttt |
| 61 | ggtcgcccgg cctcagtgag cgagcgagcg cgcagagagg gagtggccaa ctccatcact |
| 121 | aggggttcct ggaggggtgg agtcgtgacg tgaattacgt catagggtta gggaggtcgg |
| 181 | ccgctctagg agttaatttt taaaaagcag tcaaaagtcc aagtgccctt gcgagcattt |
| 241 | actctctctg tttgctctgg ttaataatct caggagcaca aacattcctt actagttcta |
| 301 | ggagttaatt tttaaaaagc agtcaaaagt ccaagtgccc ttgcgagcat ttactctctc |
| 361 | tgtttgctct ggttaataat ctcaggagca caaacattcc ttactagttc tagagcggcc |
| 421 | gccagtgtgc tggaattcgg cttttttagg gctggaagct acctttgaca tcatttcctc |
| 481 | tgcgaatgca tgtataattt ctacagaacc tattagaaag gatcacccag cctctgcttt |
| 541 | tgtacaactt tcccttaaaa aactgccaat cccactgctg tttggcccaa tagtgagaac |
| 601 | tttttcctgc tgcctcttgg tgcttttgcc tatggcccct attctgcctg ctgaagacac |
| 661 | tcttgccagc atggacttaa acccctccag ctctgacaat cctctttctc ttttgtttta |
| 721 | catgaagggt ctggcagcca aagcaatcac tcaaagttca aaccttatca ttttttgctt |
| 781 | tgttcctctt ggccttggtt ttgtacatca gctttgaaaa taccatccca gggttaatgc |
| 841 | tggggttaat ttataactga gagtgctcta gttctgcaat acaggacatg ctataaaaat |
| 901 | ggaaagatgt tgctttctga gagatcagct tacatgtggt accgagctcg gatccactag |
| 961 | taacggccgc cagtgtgctg gaattcggct ttccaggcca tcttttttta tgggggtgag |
| 1021 | gcaccctccc tgttctcaca ggctgctggc tgtgtgtgct ctggtgtctc tggccactgc |
| 1081 | catggagttt gggctgagct gggtctttct ggtggccctg ctgaagggag tccagtgtga |
| 1141 | gcagcaggga gccagcagac cagggccccg ggatgcccag gcacaccccg gccgtcccag |
| 1201 | agcagtgccc acacagtgcg acgtcccccc caacagccgc ttcgattgcg cccctgacaa |
| 1261 | ggccatcacc caggaacagt gcgaggcccg cggctgctgc tacatccctg caaagcaggg |
| 1321 | gctgcaggga gcccagatgg ggcagccctg gtgcttcttc ccacccagct accccagcta |
| 1381 | caagctggag aacctgagct cctctgaaat gggctacacg gccaccctga cccgtaccac |
| 1441 | ccccaccttc ttccccaagg acatcctgac cctgcggctg gacgtgatga tggagactga |
| 1501 | gaaccgcctc cacttcacga tcaaagatcc agctaacagg cgctacgagg tgcccttgga |
| 1561 | gaccccgcgt gtccacagcc gggcaccgtc cccactctac agcgtggagt tctccgagga |
| 1621 | gcccttcggg gtgatcgtgc accggcagct ggacggccgc gtgctgctga acacgacggt |
| 1681 | ggcgcccctg ttctttgcgg accagttcct tcagctgtcc acctcgctgc cctcgcagta |
| 1741 | tatcacaggc ctcgccgagc acctcagtcc cctgatgctc agcaccagct ggaccaggat |
| 1801 | caccctgtgg aaccgggacc ttgcgcccac gcccggtgcg aacctctacg ggtctcaccc |
| 1861 | tttctacctg gcgctggagg acggcgggtc ggcacacggg gtgttcctgc taaacagcaa |
| 1921 | tgccatggat gtggtcctgc agccgagccc tgcccttagc tggaggtcga caggtgggat |
| 1981 | cctggatgtc tacatcttcc tgggcccaga gcccaagagc gtggtgcagc agtacctgga |
| 2041 | cgttgtggga tacccgttca tgccgccata ctggggcctg ggcttccacc tgtgccgctg |
| 2101 | gggctactcc tccaccgcta tcacccgcca ggtggtggag aacatgacca gggcccactt |
| 2161 | ccccctggac gtccaatgga acgacctgga ctacatggac tcccggaggg acttcacgtt |
| 2221 | caacaaggat ggcttccggg acttcccggc catggtgcag gagctgcacc agggcggccg |
| 2281 | gcgctacatg atgatcgtgg atcctgccat cagcagctcg ggccctgccg ggagctacag |
| 2341 | gccctacgac gagggtctgc ggaggggggt tttcatcacc aacgagaccg gccagccgct |
| 2401 | gattgggaag gtatggcccg ggtccactgc cttccccgac ttcaccaacc ccacagccct |
| 2461 | ggcctggtgg gaggacatgg tggctgagtt ccatgaccag gtgcccttcg acggcatgtg |
| 2521 | gattgacatg aacgagcctt ccaacttcat cagaggctct gaggacggct gccccaacaa |
| 2581 | tgagctggag aacccaccct acgtgcctgg ggtggttggg gggaccctcc aggcggccac |
| 2641 | catctgtgcc tccagccacc agtttctctc cacacactac aacctgcaca acctctacgg |
| 2701 | cctgaccgaa gccatcgcct cccacagggc gctggtgaag gctcggggga cacgcccatt |
| 2761 | tgtgatctcc cgctcgacct ttgctggcca cggccgatac gccggccact ggacggggga |
| 2821 | cgtgtggagc tcctgggagc agctcgcctc ctccgtgcca gaaatcctgc agtttaacct |
| 2881 | gctgggggtg cctctggtcg gggccgacgt ctgcggcttc ctgggcaaca cctcagagga |
| 2941 | gctgtgtgtg cgctggaccc agctgggggc cttctacccc ttcatgcgga accacaacag |
| 3001 | cctgctcagt ctgccccagg agccgtacag cttcagcgag ccggcccagc aggccatgag |
| 3061 | gaaggccctc accctgcgct acgcactcct cccccacctc tacacactgt tccaccaggc |
| 3121 | ccacgtcgcg ggggagaccg tggcccggcc cctcttcctg gagttcccca aggactctag |
| 3181 | cacctggact gtggaccacc agctcctgtg gggggaggcc ctgctcatca ccccagtgct |
| 3241 | ccaggccggg aaggccgaag tgactggcta cttccccttg ggcacatggt acgacctgca |
| 3301 | gacggtgcca atagaggccc ttggcagcct cccaccccca cctgcagctc cccgtgagcc |
| 3361 | agccatccac agcgaggggc agtgggtgac gctgccggcc cccctggaca ccatcaacgt |
| 3421 | ccacctccgg gctgggtaca tcatccccct gcagggccct ggcctcacaa ccacagagtc |
| 3481 | ccgccagcag cccatggccc tggctgtggc cctgaccaag ggtggagagg cccgagggga |
| 3541 | gctgttctgg gacgatggag agagcctgga agtgctggag cgaggggcct acacacaggt |
| 3601 | catcttcctg gccaggaata acacgatcgt gaatgagctg gtacgtgtga ccagtgaggg |
| 3661 | agctggcctg cagctgcaga aggtgactgt cctgggcgtg gccacggcgc cccagcaggt |
| 3721 | cctctccaac ggtgtccctg tctccaactt cacctacagc cccgacacca aggtcctgga |
| 3781 | catctgtgtc tcgctgttga tgggagagca gtttctcgtc agctggtgtt agccgggcgg |
| 3841 | agtgtgttag tctctccaga gggaggctgg ttccccaggg aagcagagcc tgtgtgcggg |
| 3901 | cagcagctgt gtgcgggcct gggggttgtt aagtgcaatt atttttaata aaaggggcat |
| 3961 | ttggaaaaaa aaaaaaaagg tagcagtcga cagatgaatt ctgcagatct gtggcttcta |
| 4021 | gctgcccggg tggcatccct gtgacccctc cccagtgcct ctcctggccc tggaagttgc |
| 4081 | cactccagtg cccaccagcc ttgtcctaat aaaattaagt tgcatcattt tgtctgacta |
| 4141 | ggtgtccttc tataatatta tggggtggag gggggtggta tggagcaagg ggcaagttgg |
| 4201 | gaagacaacc tgagttgttg ggattccagg catcgagtag ataagtagca tggcgggtta |
| 4261 | atcattaact acaaggaacc cctagtgatg gagttggcca ctccctctct gcgcgctcgc |
| 4321 | tcgctcactg aggccgggcg accaaaggtc gcccgacgcc cgggctttgc ccgggcggcc |
| 4381 | tcagtgagcg agcgagcgcg cagagaggga cagatccgaa gccgggcaaa tcagcgcctg |
| 4441 | gcagcagtgg cgtctggcgg aaaacctcag tgtgacgctc cccgccgcgt cccacgcttg |
| 4501 | ttcccggatc tgaccaccag cgaaatccga tttttgcacc gagctgggta ataagcgttg |
| 4561 | gcaatttaac cgccagtcag gctttctttc acagtgtgga ttggcgataa aaaacaactg |
| 4621 | ctgacgccgc tgcgcgatca gttcacccgt tcaccgctgg ataacgactt ggcgtaagtg |
| 4681 | aagcgacccg taagacccta acgcctgggt cgaacgctgg aaggcggcgg gccaaaccag |
| 4741 | gccgaagcag cgttgttgca gttcacggca gatacacttg ctgttgcggt gctgattacg |
| 4801 | accgctcact cgtggcagca acaggggaaa accttattta tcagccggaa aacctaccgg |
| 4861 | attgttggta gtggtcaata ggcgattacc gttgtgttga agtggcgagc gatacaccgc |
| 4921 | ttccggcgcg gattggcctg aactgccaac tggcgcaggt agcagagcgg gtaaactggc |
| 4981 | tcggattagg gccgcaagaa aactatcccg accgccttac tgccgcctgt tttgaccgct |
| 5041 | gggatctgcc aagtcagaca gtatagcccg tacgtcttcc cgagcgaaaa cggtctgcgc |
| 5101 | tgcgggacgc gcgaattgaa tttggcccac accagtggcg cggcgacttc cagttcaata |
| 5161 | tcagccgcta cagtgaacag caactgttgg aaaccagcct tcgccaactg ctgcacgcgg |
| 5221 | aagaaggcac tggctgaata tcgacggttt ccagttgggg attggtggcg acgactcctg |
| 5281 | gagcccgtca gtatcggcgg acttccaact gagcgccggt cgctacctta ccagttggtc |
| 5341 | tggtgtcaaa aagcgtccgc ttgagtctag cgatcgcgcg cagatctgtc atgtgagcaa |
| 5401 | aaggccagca aaaggccagg aaccgtaaaa aggccgcgtt gctggcgttt ttccataggc |
| 5461 | tccgcccccc tgacgagcat cacaaaaatc gacgctcaag tcagaggtgg cgaaacccga |
| 5521 | caggactata aagataccag gcgtttcccc ctggaagctc cctcgtgcgc tctcctgttc |
| 5581 | cgaccctgcc gcttaccgga tacctgtccg cctttctccc ttcgggaagc gtggcgcttt |
| 5641 | ctcatagctc acgctgtagg tatctcagtt cggtgtaggt cgttcgctcc aagctgggct |
| 5701 | gtgtgcacga accccccgtt cagcccgacc gctgcgcctt atccggtaac tatcgtcttg |
| 5761 | agtccaaccc ggtaagacac gacttatcgc cactggcagc agccactggt aacaggatta |
| 5821 | gcagagcgag gtatgtaggc ggtgctacag agttcttgaa gtggtggcct aactacggct |
| 5881 | acactagaag aacagtattt ggtatctgcg ctctgctgaa gccagttacc ttcggaaaaa |
| 5941 | gagttggtag ctcttgatcc ggcaaacaaa ccaccgctgg tagcggtggt ttttttgttt |
| 6001 | gcaagcagca gattacgcgc agaaaaaaag gatctcaaga agatcctttg atcttttcta |
| 6061 | cggggtctga cgctcagtgg aacgaaaact cacgttaagg gattttggtc atgagattat |
| 6121 | caaaaaggat cttcacctag atccttttca cgtagaaagc cagtccgcag aaacggtgct |
| 6181 | gaccccggat gaatgtcagc tactgggcta tctggacaag ggaaaacgca agcgcaaaga |
| 6241 | gaaagcaggt agcttgcagt gggcttacat ggcgatagct agactgggcg gttttatgga |
| 6301 | cagcaagcga accggaattg ccagctgggg cgccctctgg taaggttggg aagccctgca |
| 6361 | aagtaaactg gatggctttc ttgccgccaa ggatctgatg gcgcagggga tcaagatctg |
| 6421 | atcaagagac aggatgagga tcgtttcgca tgattgaaca agatggattg cacgcaggtt |
| 6481 | ctccggccgc ttgggtggag aggctattcg gctatgactg ggcacaacag acaatcggct |
| 6541 | gctctgatgc cgccgtgttc cggctgtcag cgcaggggcg cccggttctt tttgtcaaga |
| 6601 | ccgacctgtc cggtgccctg aatgaactgc aagacgaggc agcgcggcta tcgtggctgg |
| 6661 | ccacgacggg cgttccttgc gcagctgtgc tcgacgttgt cactgaagcg ggaagggact |
| 6721 | ggctgctatt gggcgaagtg ccggggcagg atctcctgtc atctcacctt gctcctgccg |
| 6781 | agaaagtatc catcatggct gatgcaatgc ggcggctgca tacgcttgat ccggctacct |
| 6841 | gcccattcga ccaccaagcg aaacatcgca tcgagcgagc acgtactcgg atggaagccg |
| 6901 | gtcttgtcga tcaggatgat ctggacgaag agcatcaggg gctcgcgcca gccgaactgt |
| 6961 | tcgccaggct caaggcgagc atgcccgacg gcgaggatct cgtcgtgacc catggcgatg |
| 7021 | cctgcttgcc gaatatcatg gtggaaaatg gccgcttttc tggattcatc gactgtggcc |
| 7081 | ggctgggtgt ggcggaccgc tatcaggaca tagcgttggc tacccgtgat attgctgaag |
| 7141 | agcttggcgg cgaatgggct gaccgcttcc tcgtgcttta cggtatcgcc gctcccgatt |
| 7201 | cgcagcgcat cgccttctat cgccttcttg acgagttctt ctgaatttaa agcccaatac |
| 7261 | gcaaaccgcc tctccccgcg cgttggccga agcggttcaa tattttgtta aaattcgcgt |
| 7321 | taaatttttg ttaaatcagc tattttttaa ccaataggcc gaaatcggca aaatcccttg |
| 7381 | taaatcaaaa gaatagaccg agatagggtt gagtgttgtt ccagtttgga acaagagtcc |
| 7441 | actattaaag aacgtggact ccaacgtcaa agggcgaaaa accgtctatc agggcgttgg |
| 7501 | cccactacgt gaaccttcac cctaatcaag ttttttgggg tcgaggtgcc gtaaagcact |
| 7561 | aaatcggaac cctaaaggga gcccccgatt tagagcttga cggggaaacc ggcgaacgtg |
| 7621 | gcgagaaagg aagggaagaa agcgaaagga gcgggcgcta gggcgctggc aagtgtagcg |
| 7681 | gtcacgctgc gcgtaaccac cacacccgcc gcgctaagcg ccgctacagg gcgcgtccct |
| 7741 | tcgccttcag gctgcgtcga gtactgtact gtgagccaga gttgcccggc gctctccggc |
| 7801 | tgcggtagtt caggcagttc aatcaactgt ttaccttgtg gagcgactcc agaggcactt |
| 7861 | caccgcttgc cagcggctta cgatccagcg ccacgatcca gtgcaggaga tcgttatcgc |
| 7921 | tatacggaac aggtattcgc tggtcacttc gataaggttt gcccggataa acggaactgg |
| 7981 | aaaaactgct gctggtgttt tgcttccgtc agtgctggat cggcgtgcgg tcggcaaaga |
| 8041 | ccagaccgtt ctaacagaac tggcgattgt tcggcgtatc gccaaaatca ccgccgtaag |
| 8101 | ccgaccacgg gttgccgttt tcagcaggat ttaatcagcg actgatccac ccagtcccag |
| 8161 | acgaagccgc cctgtaaacg gggatactga cgaaacgcct gccagtattt agcgaaaccg |
| 8221 | ccaagactgt tacccaagcg tgggcgtatt cgcaaaggat cagcgggcgc gtctctccag |
| 8281 | gtagcgaaag ccttttttga tcgacctttc ggcacagccg ggaagggctg gtcttcaacc |
| 8341 | acgcgcgcgt acaacgggca aataatatcg gtggccgtgg tgtcggctcc gccgccttca |
| 8401 | actgcaccgg gcgggaagga tcgacagatt tgatccagcg atacagcgcg tcgtgattag |
| 8461 | cgccgtggcc tgattcaatt ccccagcgac cagtagatca cactcgggtg attacgattg |
| 8521 | cgctgcacca gtcgcgttac ggttcgctct tcgccggtag ccagcgcgga tcacggtcag |
| 8581 | acgattcgtt ggcacgatcc gtgggtttca atactggctt caaaccacca ctaacaggcc |
| 8641 | gtagcggtcg cacagcgtgt accacagcgg ttggttcgga taatcgaaca gcgcacggcg |
| 8701 | ttaaagttgt tctgcttcaa cagcaggata ttctgcacct tcgtctgctc ttcctaacct |
| 8761 | gaccaagcag aggatctgct cgtgacggtt aatcctcgaa tcagcaacgg cttgccgttc |
| 8821 | agcagcagca gaccaagttc aatccgcacc tcgcggaaac cgacaacgca ggcttctgct |
| 8881 | tcaatcagcg tgccgtcggc ggtgtgcagt tcaaccaccg cacgatagag attcgggatt |
| 8941 | tcggcgctcc acagtttcgg gttttcgacg ttcagacgta gtgtgacgcg atctgcaaac |
| 9001 | caccacgctc aacgataatt tcaccgccga aaggcgcggt gccgctggcg acctgcgttt |
| 9061 | caccctgcca gaaagaaact gttacccgta ggtagtcacg caactcgccg cacactgaac |
| 9121 | ttcagcctcc agtacagcgc ggctgaaatc gtcttaaagc gagtggcaac tggaaatcgc |
| 9181 | tgatttgtgt agtcggttta gcagcaacga gacttcacgg aaaatccgct aatccgccac |
| 9241 | agatcctgat cttccagata actgccgtca ctccaacgca gcaccttcac cgcgaggcgg |
| 9301 | ttttctccgg cgcgtaaaaa tcgctcaggt caaattcaga cggcaaacga ctgtcctggc |
| 9361 | cgtaaccgac ccagcgcccg ttgcaccaca gattgaaacg ccgagtttac gcctcaaaaa |
| 9421 | taattcgcgt ctggccttcc tgtagccagc tttcacaact ataatagtga gcgagtaaca |
| 9481 | acccgtcgga ttctccgtgg gaacaaacgg cggattgacc gtatagggat aggttacgtt |
| 9541 | ggtgtagtag ggcgctccgt aaccgtgcta ctgccagttt gaggggacga cgacagtatc |
| 9601 | ggcctcagga agatcgcact ccagccagct ttccggcacc gcttctggta ctggaaacca |
| 9661 | ggcaaagcgc ctatcgccta tcaggctgca caactgttgg gaagggcgat ctgtgcgggc |
| 9721 | ctcttcgcta ttacgccagc ttgcgaaagg gggtagtgct gcaaggcgat taagttgggt |
| 9781 | aacgccaggg ttttcccagt cacgacgtgg atctgggcca ctccctct |

| pP153 (SEQ ID NO: 510) | |
|---|---|
| (SEQ ID NO: 510) | |
| 1 | ctgcgcgctc gctcgctcac tgaggccgcc cgggcaaagc ccgggcgtcg ggcgaccttt |
| 61 | ggtcgcccgg cctcagtgag cgagcgagcg cgcagagagg gagtggccaa ctccatcact |
| 121 | aggggttcct ggaggggtgg agtcgtgacg tgaattacgt catagggtta gggaggtcgg |
| 181 | ccgctctagg agttaatttt taaaaagcag tcaaaagtcc aagtgccctt gcgagcattt |
| 241 | actctctctg tttgctctgg ttaataatct caggagcaca aacattcctt actagttcta |
| 301 | ggagttaatt tttaaaaagc agtcaaaagt ccaagtgccc ttgcgagcat ttactctctc |
| 361 | tgtttgctct ggttaataat ctcaggagca caaacattcc ttactagttc tagagcggcc |
| 421 | gccagtgtgc tggaattcgg cttttttagg gctggaagct acctttgaca tcatttcctc |
| 481 | tgcgaatgca tgtataattt ctacagaacc tattagaaag gatcacccag cctctgcttt |
| 541 | tgtacaactt tcccttaaaa aactgccaat cccactgctg tttggcccaa tagtgagaac |
| 601 | tttttcctgc tgcctcttgg tgcttttgcc tatggcccct attctgcctg ctgaagacac |
| 661 | tcttgccagc atggacttaa acccctccag ctctgacaat cctctttctc ttttgtttta |
| 721 | catgaagggt ctggcagcca aagcaatcac tcaaagttca aaccttatca ttttttgctt |
| 781 | tgttcctctt ggccttggtt ttgtacatca gctttgaaaa taccatccca gggttaatgc |
| 841 | tggggttaat ttataactga gagtgctcta gttctgcaat acaggacatg ctataaaaat |
| 901 | ggaaagatgt tgctttctga gagatcaggt ggattcttgg gcatttgctt aagcttggta |
| 961 | ccttttttat gggggtgagg caccctccct gttctcacag gctgctggct gtgtgtgctc |
| 1021 | tggtgtctct ggccactgcc atggagtttg ggctgagctg ggtctttctg gtggccctgc |
| 1081 | tgaagggagt ccagtgtgag cagcagggag ccagcagacc agggccccgg gatgcccagg |
| 1141 | cacaccccgg ccgtcccaga gcagtgccca cacagtgcga cgtccccccc aacagccgct |
| 1201 | tcgattgcgc ccctgacaag gccatcaccc aggaacagtg cgaggcccgc ggctgctgct |
| 1261 | acatccctgc aaagcagggg ctgcagggag cccagatggg gcagccctgg tgcttcttcc |
| 1321 | cacccagcta ccccagctac aagctggaga acctgagctc ctctgaaatg ggctacacgg |
| 1381 | ccaccctgac ccgtaccacc cccaccttct tccccaagga catcctgacc ctgcggctgg |
| 1441 | acgtgatgat ggagactgag aaccgcctcc acttcacgat caaagatcca gctaacaggc |
| 1501 | gctacgaggt gcccttggag accccgcgtg tccacagccg ggcaccgtcc ccactctaca |
| 1561 | gcgtggagtt ctccgaggag cccttcgggg tgatcgtgca ccggcagctg gacggccgcg |
| 1621 | tgctgctgaa cacgacggtg gcgcccctgt tctttgcgga ccagttcctt cagctgtcca |
| 1681 | cctcgctgcc ctcgcagtat atcacaggcc tcgccgagca cctcagtccc ctgatgctca |
| 1741 | gcaccagctg gaccaggatc accctgtgga accgggacct tgcgcccacg cccggtgcga |
| 1801 | acctctacgg gtctcaccct ttctacctgg cgctggagga cggcgggtcg gcacacgggg |
| 1861 | tgttcctgct aaacagcaat gccatggatg tggtcctgca gccgagccct gcccttagct |
| 1921 | ggaggtcgac aggtgggatc ctggatgtct acatcttcct gggcccagag cccaagagcg |
| 1981 | tggtgcagca gtacctggac gttgtgggat acccgttcat gccgccatac tggggcctgg |
| 2041 | gcttccacct gtgccgctgg ggctactcct ccaccgctat cacccgccag gtggtggaga |
| 2101 | acatgaccag ggcccacttc cccctggacg tccaatggaa cgacctggac tacatggact |
| 2161 | cccggaggga cttcacgttc aacaaggatg gcttccggga cttcccggcc atggtgcagg |
| 2221 | agctgcacca gggcggccgg cgctacatga tgatcgtgga tcctgccatc agcagctcgg |
| 2281 | gccctgccgg gagctacagg ccctacgacg agggtctgcg gaggggggtt ttcatcacca |
| 2341 | acgagaccgg ccagccgctg attgggaagg tatggcccgg gtccactgcc ttccccgact |
| 2401 | tcaccaaccc cacagccctg gcctggtggg aggacatggt ggctgagttc catgaccagg |
| 2461 | tgcccttcga cggcatgtgg attgacatga acgagccttc caacttcatc agaggctctg |
| 2521 | aggacggctg ccccaacaat gagctggaga acccacccta cgtgcctggg gtggttgggg |
| 2581 | ggaccctcca ggcggccacc atctgtgcct ccagccacca gtttctctcc acacactaca |
| 2641 | acctgcacaa cctctacggc ctgaccgaag ccatcgcctc ccacagggcg ctggtgaagg |
| 2701 | ctcgggggac acgcccattt gtgatctccc gctcgacctt tgctggccac ggccgatacg |
| 2761 | ccggccactg gacgggggac gtgtggagct cctgggagca gctcgcctcc tccgtgccag |
| 2821 | aaatcctgca gtttaacctg ctgggggtgc ctctggtcgg ggccgacgtc tgcggcttcc |
| 2881 | tgggcaacac ctcagaggag ctgtgtgtgc gctggaccca gctgggggcc ttctacccct |
| 2941 | tcatgcggaa ccacaacagc ctgctcagtc tgccccagga gccgtacagc ttcagcgagc |
| 3001 | cggcccagca ggccatgagg aaggccctca ccctgcgcta cgcactcctc ccccacctct |
| 3061 | acacactgtt ccaccaggcc cacgtcgcgg gggagaccgt ggcccggccc ctcttcctgg |
| 3121 | agttccccaa ggactctagc acctggactg tggaccacca gctcctgtgg ggggaggccc |
| 3181 | tgctcatcac cccagtgctc caggccggga aggccgaagt gactggctac ttccccttgg |
| 3241 | gcacatggta cgacctgcag acggtgccaa tagaggccct tggcagcctc ccacccccac |
| 3301 | ctgcagctcc ccgtgagcca gccatccaca gcgaggggca gtgggtgacg ctgccggccc |
| 3361 | ccctggacac catcaacgtc cacctccggg ctgggtacat catccccctg cagggccctg |
| 3421 | gcctcacaac cacagagtcc cgccagcagc ccatggccct ggctgtggcc ctgaccaagg |
| 3481 | gtggagaggc ccgaggggag ctgttctggg acgatggaga gagcctggaa gtgctggagc |
| 3541 | gaggggccta cacacaggtc atcttcctgg ccaggaataa cacgatcgtg aatgagctgg |
| 3601 | tacgtgtgac cagtgaggga gctggcctgc agctgcagaa ggtgactgtc ctgggcgtgg |
| 3661 | ccacggcgcc ccagcaggtc ctctccaacg gtgtccctgt ctccaacttc acctacagcc |
| 3721 | ccgacaccaa ggtcctggac atctgtgtct cgctgttgat gggagagcag tttctcgtca |
| 3781 | gctggtgtta gccgggcgga gtgtgttagt ctctccagag ggaggctggt tccccaggga |
| 3841 | agcagagcct gtgtgcgggc agcagctgtg tgcgggcctg ggggttgtta agtgcaatta |
| 3901 | tttttaataa aaggggcatt tggaaaaaaa aaaaaaaggt agcagtcgac agatgaattc |
| 3961 | tgcagatctg tggcttctag ctgcccgggt ggcatccctg tgacccctcc ccagtgcctc |
| 4021 | tcctggccct ggaagttgcc actccagtgc ccaccagcct tgtcctaata aaattaagtt |
| 4081 | gcatcatttt gtctgactag gtgtccttct ataatattat ggggtggagg ggggtggtat |
| 4141 | ggagcaaggg gcaagttggg aagacaacct gagttgttgg gattccaggc atcgagtaga |
| 4201 | taagtagcat ggcgggttaa tcattaacta caaggaaccc ctagtgatgg agttggccac |
| 4261 | tccctctctg cgcgctcgct cgctcactga ggccgggcga ccaaaggtcg cccgacgccc |
| 4321 | gggctttgcc cgggcggcct cagtgagcga gcgagcgcgc agagagggac agatccgaag |
| 4381 | ccgggcaaat cagcgcctgg cagcagtggc gtctggcgga aaacctcagt gtgacgctcc |
| 4441 | ccgccgcgtc ccacgcttgt tcccggatct gaccaccagc gaaatccgat ttttgcaccg |
| 4501 | agctgggtaa taagcgttgg caatttaacc gccagtcagg ctttctttca cagtgtggat |
| 4561 | tggcgataaa aaacaactgc tgacgccgct gcgcgatcag ttcacccgtt caccgctgga |
| 4621 | taacgacttg gcgtaagtga agcgacccgt aagaccctaa cgcctgggtc gaacgctgga |
| 4681 | aggcggcggg ccaaaccagg ccgaagcagc gttgttgcag ttcacggcag atacacttgc |
| 4741 | tgttgcggtg ctgattacga ccgctcactc gtggcagcaa caggggaaaa ccttatttat |
| 4801 | cagccggaaa acctaccgga ttgttggtag tggtcaatag gcgattaccg ttgtgttgaa |
| 4861 | gtggcgagcg atacaccgct tccggcgcgg attggcctga actgccaact ggcgcaggta |
| 4921 | gcagagcggg taaactggct cggattaggg ccgcaagaaa actatcccga ccgccttact |
| 4981 | gccgcctgtt ttgaccgctg ggatctgcca agtcagacag tatagcccgt acgtcttccc |
| 5041 | gagcgaaaac ggtctgcgct gcgggacgcg cgaattgaat ttggcccaca ccagtggcgc |
| 5101 | ggcgacttcc agttcaatat cagccgctac agtgaacagc aactgttgga aaccagcctt |
| 5161 | cgccaactgc tgcacgcgga agaaggcact ggctgaatat cgacggtttc cagttgggga |
| 5221 | ttggtggcga cgactcctgg agcccgtcag tatcggcgga cttccaactg agcgccggtc |
| 5281 | gctaccttac cagttggtct ggtgtcaaaa agcgtccgct tgagtctagc gatcgcgcgc |
| 5341 | agatctgtca tgtgagcaaa aggccagcaa aaggccagga accgtaaaaa ggccgcgttg |
| 5401 | ctggcgtttt tccataggct ccgcccccct gacgagcatc acaaaaatcg acgctcaagt |
| 5461 | cagaggtggc gaaacccgac aggactataa agataccagg cgtttccccc tggaagctcc |
| 5521 | ctcgtgcgct ctcctgttcc gaccctgccg cttaccggat acctgtccgc ctttctccct |
| 5581 | tcgggaagcg tggcgctttc tcatagctca cgctgtaggt atctcagttc ggtgtaggtc |
| 5641 | gttcgctcca agctgggctg tgtgcacgaa ccccccgttc agcccgaccg ctgcgcctta |
| 5701 | tccggtaact atcgtcttga gtccaacccg gtaagacacg acttatcgcc actggcagca |
| 5761 | gccactggta acaggattag cagagcgagg tatgtaggcg gtgctacaga gttcttgaag |
| 5821 | tggtggccta actacggcta cactagaaga acagtatttg gtatctgcgc tctgctgaag |
| 5881 | ccagttacct tcggaaaaag agttggtagc tcttgatccg gcaaacaaac caccgctggt |
| 5941 | agcggtggtt tttttgtttg caagcagcag attacgcgca gaaaaaaagg atctcaagaa |
| 6001 | gatcctttga tcttttctac ggggtctgac gctcagtgga acgaaaactc acgttaaggg |
| 6061 | attttggtca tgagattatc aaaaaggatc ttcacctaga tccttttcac gtagaaagcc |
| 6121 | agtccgcaga aacggtgctg accccggatg aatgtcagct actgggctat ctggacaagg |
| 6181 | gaaaacgcaa gcgcaaagag aaagcaggta gcttgcagtg ggcttacatg gcgatagcta |
| 6241 | gactgggcgg ttttatggac agcaagcgaa ccggaattgc cagctggggc gccctctggt |
| 6301 | aaggttggga agccctgcaa agtaaactgg atggctttct tgccgccaag gatctgatgg |
| 6361 | cgcaggggat caagatctga tcaagagaca ggatgaggat cgtttcgcat gattgaacaa |
| 6421 | gatggattgc acgcaggttc tccggccgct tgggtggaga ggctattcgg ctatgactgg |
| 6481 | gcacaacaga caatcggctg ctctgatgcc gccgtgttcc ggctgtcagc gcaggggcgc |
| 6541 | ccggttcttt ttgtcaagac cgacctgtcc ggtgccctga atgaactgca agacgaggca |
| 6601 | gcgcggctat cgtggctggc cacgacgggc gttccttgcg cagctgtgct cgacgttgtc |
| 6661 | actgaagcgg gaagggactg gctgctattg ggcgaagtgc cggggcagga tctcctgtca |
| 6721 | tctcaccttg ctcctgccga gaaagtatcc atcatggctg atgcaatgcg gcggctgcat |
| 6781 | acgcttgatc cggctacctg cccattcgac caccaagcga aacatcgcat cgagcgagca |
| 6841 | cgtactcgga tggaagccgg tcttgtcgat caggatgatc tggacgaaga gcatcagggg |
| 6901 | ctcgcgccag ccgaactgtt cgccaggctc aaggcgagca tgcccgacgg cgaggatctc |
| 6961 | gtcgtgaccc atggcgatgc ctgcttgccg aatatcatgg tggaaaatgg ccgcttttct |
| 7021 | ggattcatcg actgtggccg gctgggtgtg gcggaccgct atcaggacat agcgttggct |
| 7081 | acccgtgata ttgctgaaga gcttggcggc gaatgggctg accgcttcct cgtgctttac |
| 7141 | ggtatcgccg ctcccgattc gcagcgcatc gccttctatc gccttcttga cgagttcttc |
| 7201 | tgaatttaaa gcccaatacg caaaccgcct ctccccgcgc gttggccgaa gcggttcaat |
| 7261 | attttgttaa aattcgcgtt aaatttttgt taaatcagct attttttaac caataggccg |
| 7321 | aaatcggcaa aatcccttgt aaatcaaaag aatagaccga gatagggttg agtgttgttc |
| 7381 | cagtttggaa caagagtcca ctattaaaga acgtggactc caacgtcaaa gggcgaaaaa |
| 7441 | ccgtctatca gggcgttggc ccactacgtg aaccttcacc ctaatcaagt tttttggggt |
| 7501 | cgaggtgccg taaagcacta aatcggaacc ctaaagggag cccccgattt agagcttgac |
| 7561 | ggggaaaccg gcgaacgtgg cgagaaagga agggaagaaa gcgaaaggag cgggcgctag |
| 7621 | ggcgctggca agtgtagcgg tcacgctgcg cgtaaccacc acacccgccg cgctaagcgc |
| 7681 | cgctacaggg cgcgtccctt cgccttcagg ctgcgtcgag tactgtactg tgagccagag |
| 7741 | ttgcccggcg ctctccggct gcggtagttc aggcagttca atcaactgtt taccttgtgg |
| 7801 | agcgactcca gaggcacttc accgcttgcc agcggcttac gatccagcgc cacgatccag |
| 7861 | tgcaggagat cgttatcgct atacggaaca ggtattcgct ggtcacttcg ataaggtttg |
| 7921 | cccggataaa cggaactgga aaaactgctg ctggtgtttt gcttccgtca gtgctggatc |
| 7981 | ggcgtgcggt cggcaaagac cagaccgttc taacagaact ggcgattgtt cggcgtatcg |
| 8041 | ccaaaatcac cgccgtaagc cgaccacggg ttgccgtttt cagcaggatt taatcagcga |
| 8101 | ctgatccacc cagtcccaga cgaagccgcc ctgtaaacgg ggatactgac gaaacgcctg |
| 8161 | ccagtattta gcgaaaccgc caagactgtt acccaagcgt gggcgtattc gcaaaggatc |
| 8221 | agcgggcgcg tctctccagg tagcgaaagc cttttttgat cgacctttcg gcacagccgg |
| 8281 | gaagggctgg tcttcaacca cgcgcgcgta caacgggcaa ataatatcgg tggccgtggt |
| 8341 | gtcggctccg ccgccttcaa ctgcaccggg cgggaaggat cgacagattt gatccagcga |
| 8401 | tacagcgcgt cgtgattagc gccgtggcct gattcaattc cccagcgacc agtagatcac |
| 8461 | actcgggtga ttacgattgc gctgcaccag tcgcgttacg gttcgctctt cgccggtagc |
| 8521 | cagcgcggat cacggtcaga cgattcgttg gcacgatccg tgggtttcaa tactggcttc |
| 8581 | aaaccaccac taacaggccg tagcggtcgc acagcgtgta ccacagcggt tggttcggat |
| 8641 | aatcgaacag cgcacggcgt taaagttgtt ctgcttcaac agcaggatat tctgcacctt |
| 8701 | cgtctgctct tcctaacctg accaagcaga ggatctgctc gtgacggtta atcctcgaat |
| 8761 | cagcaacggc ttgccgttca gcagcagcag accaagttca atccgcacct cgcggaaacc |
| 8821 | gacaacgcag gcttctgctt caatcagcgt gccgtcggcg gtgtgcagtt caaccaccgc |
| 8881 | acgatagaga ttcgggattt cggcgctcca cagtttcggg ttttcgacgt tcagacgtag |
| 8941 | tgtgacgcga tctgcaaacc accacgctca acgataattt caccgccgaa aggcgcggtg |
| 9001 | ccgctggcga cctgcgtttc accctgccag aaagaaactg ttacccgtag gtagtcacgc |
| 9061 | aactcgccgc acactgaact tcagcctcca gtacagcgcg gctgaaatcg tcttaaagcg |
| 9121 | agtggcaact ggaaatcgct gatttgtgta gtcggtttag cagcaacgag acttcacgga |
| 9181 | aaatccgcta atccgccaca gatcctgatc ttccagataa ctgccgtcac tccaacgcag |
| 9241 | caccttcacc gcgaggcggt tttctccggc gcgtaaaaat cgctcaggtc aaattcagac |
| 9301 | ggcaaacgac tgtcctggcc gtaaccgacc cagcgcccgt tgcaccacag attgaaacgc |
| 9361 | cgagtttacg cctcaaaaat aattcgcgtc tggccttcct gtagccagct ttcacaacta |
| 9421 | taatagtgag cgagtaacaa cccgtcggat tctccgtggg aacaaacggc ggattgaccg |
| 9481 | tatagggata ggttacgttg gtgtagtagg gcgctccgta accgtgctac tgccagtttg |
| 9541 | aggggacgac gacagtatcg gcctcaggaa gatcgcactc cagccagctt tccggcaccg |
| 9601 | cttctggtac tggaaaccag gcaaagcgcc tatcgcctat caggctgcac aactgttggg |
| 9661 | aagggcgatc tgtgcgggcc tcttcgctat tacgccagct tgcgaaaggg ggtagtgctg |
| 9721 | caaggcgatt aagttgggta acgccagggt tttcccagtc acgacgtgga tctgggccac |
| 9781 | tccctct |

| pP155 (SEQ ID NO: 511) | |
|---|---|
| (SEQ ID NO: 511) | |
| 1 | ttgcccatta tacgcgcgta taatggacta ttgtgtgctg atatctgtac acttaagggc |
| 121 | tagatcttag cttacgtcac tagagggtcc acgtttagtt tttaagatcc attgatctcc |
| 181 | taaacgctgc aagattcgca acctggtata cttagcctag gcgctaggtc ctagtgcagc |
| 241 | gggacttttt ttctaaagtc gttgagagga ggagtcgtca gaccagatag ctttgatgtc |
| 301 | ctgatcggaa ggatcgttgg cccccctgca ggcagctgtt aattaactgc gcgctcgctc |
| 361 | gctcactgag gccgcccggg caaagcccgg gcgtcgggcg acctttggtc gcccggcctc |
| 421 | agtgagcgag cgagcgcgca gagagggagt ggccaactcc atcactaggg gttccttgta |
| 481 | gttaatgatt aacccgccat gctacttatc tacggcgcgc cacgcgtgga ggggtggagt |
| 541 | cgtgacgtga attacgtcat agggttaggg aggtcggccg ctctaggagt taatttttaa |
| 601 | aaagcagtca aaagtccaag tgcccttgcg agcatttact ctctctgttt gctctggtta |
| 661 | ataatctcag gagcacaaac attccttact agttctagga gttaattttt aaaaagcagt |
| 721 | caaaagtcca agtgcccttg cgagcattta ctctctctgt ttgctctggt taataatctc |
| 781 | aggagcacaa acattcctta ctagttctag agcggccgcc agtgtgctgg aattcggctt |
| 841 | ttttagggct ggaagctacc tttgacatca tttcctctgc gaatgcatgt ataatttcta |
| 901 | cagaacctat tagaaaggat cacccagcct ctgcttttgt acaactttcc cttaaaaaac |
| 961 | tgccaatccc actgctgttt ggcccaatag tgagaacttt ttcctgctgc ctcttggtgc |
| 1021 | ttttgcctat ggcccctatt ctgcctgctg aagacactct tgccagcatg gacttaaacc |
| 1081 | cctccagctc tgacaatcct ctttctcttt tgttttacat gaagggtctg gcagccaaag |
| 1141 | caatcactca aagttcaaac cttatcattt tttgctttgt tcctcttggc cttggttttg |
| 1201 | tacatcagct ttgaaaatac catcccaggg ttaatgctgg ggttaattta taactgagag |
| 1261 | tgctctagtt ctgcaataca ggacatgcta taaaaatgga aagatgttgc tttctgagag |
| 1321 | atcagcttac atgtggtacc gagctcggat ccactagtaa cggccgccag tgtgctggaa |
| 1381 | ttcggctttc caggccatct ttttttatgg gagtgaggca cccgccctgc tcccaccggc |
| 1441 | tcctggccgt ctgcgccctc gtgtccttgg caaccgccat ggagtttggg ctgagctggg |
| 1501 | tctttctggt ggccctgctg aagggagtcc agtgtgagca gcagggagcc agcagaccag |
| 1561 | ggccccggga tgcccaggca caccccggcc gtcccagagc agtgcccaca cagtgcgacg |
| 1621 | tcccccccaa cagccgcttc gattgcgccc ctgacaaggc catcacccag gaacagtgcg |
| 1681 | aggcccgcgg ctgctgctac atccctgcaa agcaggggct gcagggagcc cagatggggc |
| 1741 | agccctggtg cttcttccca cccagctacc ccagctacaa gctggagaac ctgagctcct |
| 1801 | ctgaaatggg ctacacggcc accctgaccc gtaccacccc caccttcttc cccaaggaca |
| 1861 | tcctgaccct gcggctggac gtgatgatgg agactgagaa ccgcctccac ttcacgatca |
| 1921 | aagatccagc taacaggcgc tacgaggtgc ccttggagac cccgcgtgtc cacagccggg |
| 1981 | caccgtcccc actctacagc gtggagttct ccgaggagcc cttcggggtg atcgtgcacc |
| 2041 | ggcagctgga cggccgcgtg ctgctgaaca cgacggtggc gcccctgttc tttgcggacc |
| 2101 | agttccttca gctgtccacc tcgctgccct cgcagtatat cacaggcctc gccgagcacc |
| 2161 | tcagtcccct gatgctcagc accagctgga ccaggatcac cctgtggaac cgggaccttg |
| 2221 | cgcccacgcc cggtgcgaac ctctacgggt ctcacccttt ctacctggcg ctggaggacg |
| 2281 | gcgggtcggc acacggggtg ttcctgctaa acagcaatgc catggatgtg gtcctgcagc |
| 2341 | cgagccctgc ccttagctgg aggtcgacag gtgggatcct ggatgtctac atcttcctgg |
| 2401 | gcccagagcc caagagcgtg gtgcagcagt acctggacgt tgtgggatac ccgttcatgc |
| 2461 | cgccatactg gggcctgggc ttccacctgt gccgctgggg ctactcctcc accgctatca |
| 2521 | cccgccaggt ggtggagaac atgaccaggg cccacttccc cctggacgtc caatggaacg |
| 2581 | acctggacta catggactcc cggagggact tcacgttcaa caaggatggc ttccgggact |
| 2641 | tcccggccat ggtgcaggag ctgcaccagg gcggccggcg ctacatgatg atcgtggatc |
| 2701 | ctgccatcag cagctcgggc cctgccggga gctacaggcc ctacgacgag ggtctgcgga |
| 2761 | ggggggtttt catcaccaac gagaccggcc agccgctgat tgggaaggta tggcccgggt |
| 2821 | ccactgcctt ccccgacttc accaacccca cagccctggc ctggtgggag gacatggtgg |
| 2881 | ctgagttcca tgaccaggtg cccttcgacg gcatgtggat tgacatgaac gagccttcca |
| 2941 | acttcatcag aggctctgag gacggctgcc ccaacaatga gctggagaac ccaccctacg |
| 3001 | tgcctggggt ggttgggggg accctccagg cggccaccat ctgtgcctcc agccaccagt |
| 3061 | ttctctccac acactacaac ctgcacaacc tctacggcct gaccgaagcc atcgcctccc |
| 3121 | acagggcgct ggtgaaggct cgggggacac gcccatttgt gatctcccgc tcgacctttg |
| 3181 | ctggccacgg ccgatacgcc ggccactgga cgggggacgt gtggagctcc tgggagcagc |
| 3241 | tcgcctcctc cgtgccagaa atcctgcagt ttaacctgct gggggtgcct ctggtcgggg |
| 3301 | ccgacgtctg cggcttcctg ggcaacacct cagaggagct gtgtgtgcgc tggacccagc |
| 3361 | tgggggcctt ctaccccttc atgcggaacc acaacagcct gctcagtctg ccccaggagc |
| 3421 | cgtacagctt cagcgagccg gcccagcagg ccatgaggaa ggccctcacc ctgcgctacg |
| 3481 | cactcctccc ccacctctac acactgttcc accaggccca cgtcgcgggg gagaccgtgg |
| 3541 | cccggcccct cttcctggag ttccccaagg actctagcac ctggactgtg gaccaccagc |
| 3601 | tcctgtgggg ggaggccctg ctcatcaccc cagtgctcca ggccgggaag gccgaagtga |
| 3661 | ctggctactt ccccttgggc acatggtacg acctgcagac ggtgccaata gaggcccttg |
| 3721 | gcagcctccc acccccacct gcagctcccc gtgagccagc catccacagc gaggggcagt |
| 3781 | gggtgacgct gccggccccc ctggacacca tcaacgtcca cctccgggct gggtacatca |
| 3841 | tccccctgca gggccctggc ctcacaacca cagagtcccg ccagcagccc atggccctgg |
| 3901 | ctgtggccct gaccaagggt ggagaggccc gaggggagct gttctgggac gatggagaga |
| 3961 | gcctggaagt gctggagcga ggggcctaca cacaggtcat cttcctggcc aggaataaca |
| 4021 | cgatcgtgaa tgagctggta cgtgtgacca gtgagggagc tggcctgcag ctgcagaagg |
| 4081 | tgactgtcct gggcgtggcc acggcgcccc agcaggtcct ctccaacggt gtccctgtct |
| 4141 | ccaacttcac ctacagcccc gacaccaagg tcctggacat ctgtgtctcg ctgttgatgg |
| 4201 | gagagcagtt tctcgtcagc tggtgttagc cgggcggagt gtgttagtct ctccagaggg |
| 4261 | aggctggttc cccagggaag cagagcctgt gtgcgggcag cagctgtgtg cgggcctggg |
| 4321 | ggttgttaag tgcaattatt tttaataaaa ggggcatttg gaaaaaaaaa aaaaaggtag |
| 4381 | cagtcgacag atgaattctg cagatctgtg gcttctagct gcccgggtgg catccctgtg |
| 4441 | acccctcccc agtgcctctc ctggccctgg aagttgccac tccagtgccc accagccttg |
| 4501 | tcctaataaa attaagttgc atcattttgt ctgactaggt gtccttctat aatattatgg |
| 4561 | ggtggagggg ggtggtatgg agcaaggggc aagttgggaa gacaacctga gttgttggga |
| 4621 | ttccaggcat cgagtttaaa cgcggccgcg tagataagta gcatggcggg ttaatcatta |
| 4681 | actacaagga acccctagtg atggagttgg ccactccctc tctgcgcgct cgctcgctca |
| 4741 | ctgaggccgg gcgaccaaag gtcgcccgac gcccgggctt tgcccgggcg gcctcagtga |
| 4801 | gcgagcgagc gcgcagttaa ttaaggcgcc ctaggccgac ccttagactc tgtactcagt |
| 4861 | tctataaacg agccattgga tacgagatcc gtagattgat aagggacacg gaatatcccc |
| 4921 | ggacgcaata gacaccggtg gacagcttgg tatcctgagc acagtcgcgc gtccgaatct |
| 4981 | agctctactt tagaggcccc ggattctgat ggtcgtagac cgcagaaccg attgggggga |
| 5041 | tgagatctac tagttatcag cacacaattg cccattatac gcgcgtataa tggactattg |
| 5101 | tgtgctgata tagggataac agggtaattc tagagctagc atatggatcc atcgatttga |
| 5161 | tgcggtattt tctccttacg catctgtgcg gtatttcaca ccgcatacgt caaagcaacc |
| 5221 | atagtacgcg ccctgtagcg gcgcattaag cgcggcgggt gtggtggtta cgcgcagcgt |
| 5281 | gaccgctaca cttgccagcg ccctagcgcc cgctcctttc gctttcttcc cttcctttct |
| 5341 | cgccacgttc gccggctttc cccgtcaagc tctaaatcgg gggctccctt tagggttccg |
| 5401 | atttagtgct ttacggcacc tcgaccccaa aaaacttgat ttgggtgatg gttcacgtag |
| 5461 | tgggccatcg ccctgataga cggtttttcg ccctttgacg ttggagtcca cgttctttaa |
| 5521 | tagtggactc ttgttccaaa ctggaacaac actcaactct atctcgggct attcttttga |
| 5581 | tttataaggg attttgccga tttcggtcta ttggttaaaa aatgagctga tttaacaaaa |
| 5641 | atttaacgcg aattttaaca aaatattaac gtttacaatt ttatggtgca ctctcagtac |
| 5701 | aatctgctct gatgccgcat agttaagcca gccccgacac ccgccaacac ccgctgacgc |
| 5761 | gccctgacgg gcttgtctgc tcccggcatc cgcttacaga caagctgtga ccgtctccgg |
| 5821 | gagctgcatg tgtcagaggt tttcaccgtc atcaccgaaa cgcgcgagac gaaagggcct |
| 5881 | cgtgatacgc ctatttttat aggttaatgt catgataata atggtttctt agacgtcagg |
| 5941 | tggcactttt cggggaaatg tgcgcggaac ccctatttgt ttatttttct aaatacattc |
| 6001 | aaatatgtat ccgctcatga gacaataacc ctgataaatg cttcaataat attgaaaaag |
| 6061 | gaagagtatg agccatattc aacgggaaac gtcgaggccg cgattaaatt ccaacatgga |
| 6121 | tgctgattta tatgggtata aatgggctcg cgataatgtc gggcaatcag gtgcgacaat |
| 6181 | ctatcgcttg tatgggaagc ccgatgcgcc agagttgttt ctgaaacatg gcaaaggtag |
| 6241 | cgttgccaat gatgttacag atgagatggt cagactaaac tggctgacgg aatttatgcc |
| 6301 | tcttccgacc atcaagcatt ttatccgtac tcctgatgat gcatggttac tcaccactgc |
| 6361 | gatccccgga aaaacagcat tccaggtatt agaagaatat cctgattcag gtgaaaatat |
| 6421 | tgttgatgcg ctggcagtgt tcctgcgccg gttgcattcg attcctgttt gtaattgtcc |
| 6481 | ttttaacagc gatcgcgtat ttcgtctcgc tcaggcgcaa tcacgaatga ataacggttt |
| 6541 | ggttgatgcg agtgattttg atgacgagcg taatggctgg cctgttgaac aagtctggaa |
| 6601 | agaaatgcat aaacttttgc cattctcacc ggattcagtc gtcactcatg gtgatttctc |
| 6661 | acttgataac cttatttttg acgaggggaa attaataggt tgtattgatg ttggacgagt |
| 6721 | cggaatcgca gaccgatacc aggatcttgc catcctatgg aactgcctcg gtgagttttc |
| 6781 | tccttcatta cagaaacggc tttttcaaaa atatggtatt gataatcctg atatgaataa |
| 6841 | attgcagttt catttgatgc tcgatgagtt tttctaagcg tataatggtc tagagctagc |
| 6901 | atatggatcc atcgattcca ttatacgcct gtcagaccaa gtttactcat atatacttta |
| 6961 | gattgattta aaacttcatt tttaatttaa aaggatctag gtgaagatcc tttttgataa |
| 7021 | tctcatgacc aaaatccctt aacgtgagtt ttcgttccac tgagcgtcag accccgtaga |
| 7081 | aaagatcaaa ggatcttctt gagatccttt ttttctgcgc gtaatctgct gcttgcaaac |
| 7141 | aaaaaaacca ccgctaccag cggtggtttg tttgccggat caagagctac caactctttt |
| 7201 | tccgaaggta actggcttca gcagagcgca gataccaaat actgttcttc tagtgtagcc |
| 7261 | gtagttaggc caccacttca agaactctgt agcaccgcct acatacctcg ctctgctaat |
| 7321 | cctgttacca gtggctgctg ccagtggcga taagtcgtgt cttaccgggt tggactcaag |
| 7381 | acgatagtta ccggataagg cgcagcggtc gggctgaacg gggggttcgt gcacacagcc |
| 7441 | cagcttggag cgaacgacct acaccgaact gagataccta cagcgtgagc tatgagaaag |
| 7501 | cgccacgctt cccgaaggga gaaaggcgga caggtatccg gtaagcggca gggtcggaac |
| 7561 | aggagagcgc acgagggagc ttccaggggg aaacgcctgg tatctttata gtcctgtcgg |
| 7621 | gtttcgccac ctctgacttg agcgtcgatt tttgtgatgc tcgtcagggg ggcggagcct |
| 7681 | atggaaaaac gccagcaacg cggccttttt acggttcctg gccttttgct ggccttttgc |
| 7741 | tcacatgt |

| pP157 (SEQ ID NO: 512) | |
|---|---|
| (SEQ ID NO: 512) | |
| 1 | tctagagcta gcatatggat ccatcgattt agggataaca gggtaattat cagcacacaa |
| 61 | ttgcccatta tacgcgcgta taatggacta ttgtgtgctg atatctgtac acttaagggc |
| 121 | tagatcttag cttacgtcac tagagggtcc acgtttagtt tttaagatcc attgatctcc |
| 181 | taaacgctgc aagattcgca acctggtata cttagcctag gcgctaggtc ctagtgcagc |
| 241 | gggacttttt ttctaaagtc gttgagagga ggagtcgtca gaccagatag ctttgatgtc |
| 301 | ctgatcggaa ggatcgttgg cccccctgca ggcagctgtt aattaactgc gcgctcgctc |
| 361 | gctcactgag gccgcccggg caaagcccgg gcgtcgggcg acctttggtc gcccggcctc |
| 421 | agtgagcgag cgagcgcgca gagagggagt ggccaactcc atcactaggg gttccttgta |
| 481 | gttaatgatt aacccgccat gctacttatc tacggcgcgc cacgcgtgga ggggtggagt |
| 541 | cgtgacgtga attacgtcat agggttaggg aggtcggccg ctctaggagt taatttttaa |
| 601 | aaagcagtca aaagtccaag tgcccttgcg agcatttact ctctctgttt gctctggtta |
| 661 | ataatctcag gagcacaaac attccttact agttctagga gttaattttt aaaaagcagt |
| 721 | caaaagtcca agtgcccttg cgagcattta ctctctctgt ttgctctggt taataatctc |
| 781 | aggagcacaa acattcctta ctagttctag agcggccgcc agtgtgctgg aattcggctt |
| 841 | ttttagggct ggaagctacc tttgacatca tttcctctgc gaatgcatgt ataatttcta |
| 901 | cagaacctat tagaaaggat cacccagcct ctgcttttgt acaactttcc cttaaaaaac |
| 961 | tgccaatccc actgctgttt ggcccaatag tgagaacttt ttcctgctgc ctcttggtgc |
| 1021 | ttttgcctat ggcccctatt ctgcctgctg aagacactct tgccagcatg gacttaaacc |
| 1081 | cctccagctc tgacaatcct ctttctcttt tgttttacat gaagggtctg gcagccaaag |
| 1141 | caatcactca aagttcaaac cttatcattt tttgctttgt tcctcttggc cttggttttg |
| 1201 | tacatcagct ttgaaaatac catcccaggg ttaatgctgg ggttaattta taactgagag |
| 1261 | tgctctagtt ctgcaataca ggacatgcta taaaaatgga aagatgttgc tttctgagag |
| 1321 | atcagcttac atgtggtacc gagctcggat ccactagtaa cggccgccag tgtgctggaa |
| 1381 | ttcggctttc caggccatct ccaaccatgg gagtgaggca cccgccctgc tcccaccggc |
| 1441 | tcctggccgt ctgcgccctc gtgtccttgg caaccgctgc actcctgggg cagcagggag |
| 1501 | ccagcagacc agggccccgg gatgcccagg cacaccccgg ccgtcccaga gcagtgccca |
| 1561 | cacagtgcga cgtccccccc aacagccgct tcgattgcgc ccctgacaag gccatcaccc |
| 1621 | aggaacagtg cgaggcccgc ggctgctgct acatccctgc aaagcagggg ctgcagggag |
| 1681 | cccagatggg gcagccctgg tgcttcttcc cacccagcta ccccagctac aagctggaga |
| 1741 | acctgagctc ctctgaaatg ggctacacgg ccaccctgac ccgtaccacc cccaccttct |
| 1801 | tccccaagga catcctgacc ctgcggctgg acgtgatgat ggagactgag aaccgcctcc |
| 1861 | acttcacgat caaagatcca gctaacaggc gctacgaggt gcccttggag accccgcgtg |
| 1921 | tccacagccg ggcaccgtcc ccactctaca gcgtggagtt ctccgaggag cccttcgggg |
| 1981 | tgatcgtgca ccggcagctg gacggccgcg tgctgctgaa cacgacggtg gcgcccctgt |
| 2041 | tctttgcgga ccagttcctt cagctgtcca cctcgctgcc ctcgcagtat atcacaggcc |
| 2101 | tcgccgagca cctcagtccc ctgatgctca gcaccagctg gaccaggatc accctgtgga |
| 2161 | accgggacct tgcgcccacg cccggtgcga acctctacgg gtctcaccct ttctacctgg |
| 2221 | cgctggagga cggcgggtcg gcacacgggg tgttcctgct aaacagcaat gccatggatg |
| 2281 | tggtcctgca gccgagccct gcccttagct ggaggtcgac aggtgggatc ctggatgtct |
| 2341 | acatcttcct gggcccagag cccaagagcg tggtgcagca gtacctggac gttgtgggat |
| 2401 | acccgttcat gccgccatac tggggcctgg gcttccacct gtgccgctgg ggctactcct |
| 2461 | ccaccgctat cacccgccag gtggtggaga acatgaccag ggcccacttc cccctggacg |
| 2521 | tccaatggaa cgacctggac tacatggact cccggaggga cttcacgttc aacaaggatg |
| 2581 | gcttccggga cttcccggcc atggtgcagg agctgcacca gggcggccgg cgctacatga |
| 2641 | tgatcgtgga tcctgccatc agcagctcgg gccctgccgg gagctacagg ccctacgacg |
| 2701 | agggtctgcg gaggggggtt ttcatcacca acgagaccgg ccagccgctg attgggaagg |
| 2761 | tatggcccgg gtccactgcc ttccccgact tcaccaaccc cacagccctg gcctggtggg |
| 2821 | aggacatggt ggctgagttc catgaccagg tgcccttcga cggcatgtgg attgacatga |
| 2881 | acgagccttc caacttcatc agaggctctg aggacggctg ccccaacaat gagctggaga |
| 2941 | acccacccta cgtgcctggg gtggttgggg ggaccctcca ggcggccacc atctgtgcct |
| 3001 | ccagccacca gtttctctcc acacactaca acctgcacaa cctctacggc ctgaccgaag |
| 3061 | ccatcgcctc ccacagggcg ctggtgaagg ctcgggggac acgcccattt gtgatctccc |
| 3121 | gctcgacctt tgctggccac ggccgatacg ccggccactg gacgggggac gtgtggagct |
| 3181 | cctgggagca gctcgcctcc tccgtgccag aaatcctgca gtttaacctg ctgggggtgc |
| 3241 | ctctggtcgg ggccgacgtc tgcggcttcc tgggcaacac ctcagaggag ctgtgtgtgc |
| 3301 | gctggaccca gctgggggcc ttctacccct tcatgcggaa ccacaacagc ctgctcagtc |
| 3361 | tgccccagga gccgtacagc ttcagcgagc cggcccagca ggccatgagg aaggccctca |
| 3421 | ccctgcgcta cgcactcctc ccccacctct acacactgtt ccaccaggcc cacgtcgcgg |
| 3481 | gggagaccgt ggcccggccc ctcttcctgg agttccccaa ggactctagc acctggactg |
| 3541 | tggaccacca gctcctgtgg ggggaggccc tgctcatcac cccagtgctc caggccggga |
| 3601 | aggccgaagt gactggctac ttccccttgg gcacatggta cgacctgcag acggtgccaa |
| 3661 | tagaggccct tggcagcctc ccacccccac ctgcagctcc ccgtgagcca gccatccaca |
| 3721 | gcgaggggca gtgggtgacg ctgccggccc ccctggacac catcaacgtc cacctccggg |
| 3781 | ctgggtacat catccccctg cagggccctg gcctcacaac cacagagtcc cgccagcagc |
| 3841 | ccatggccct ggctgtggcc ctgaccaagg gtggagaggc ccgaggggag ctgttctggg |
| 3901 | acgatggaga gagcctggaa gtgctggagc gaggggccta cacacaggtc atcttcctgg |
| 3961 | ccaggaataa cacgatcgtg aatgagctgg tacgtgtgac cagtgaggga gctggcctgc |
| 4021 | agctgcagaa ggtgactgtc ctgggcgtgg ccacggcgcc ccagcaggtc ctctccaacg |
| 4081 | gtgtccctgt ctccaacttc acctacagcc ccgacaccaa ggtcctggac atctgtgtct |
| 4141 | cgctgttgat gggagagcag tttctcgtca gctggtgtta gccgggcgga gtgtgttagt |
| 4201 | ctctccagag ggaggctggt tccccaggga agcagagcct gtgtgcgggc agcagctgtg |
| 4261 | tgcgggcctg ggggttgtta agtgcaatta tttttaataa aaggggcatt tggaaaaaaa |
| 4321 | aaaaaaaggt agcagtcgac agatgaattc tgcagatctg tggcttctag ctgcccgggt |
| 4381 | ggcatccctg tgacccctcc ccagtgcctc tcctggccct ggaagttgcc actccagtgc |
| 4441 | ccaccagcct tgtcctaata aaattaagtt gcatcatttt gtctgactag gtgtccttct |
| 4501 | ataatattat ggggtggagg ggggtggtat ggagcaaggg gcaagttggg aagacaacct |
| 4561 | gagttgttgg gattccaggc atcgagttta aacgcggccg cgtagataag tagcatggcg |
| 4621 | ggttaatcat taactacaag gaacccctag tgatggagtt ggccactccc tctctgcgcg |
| 4681 | ctcgctcgct cactgaggcc gggcgaccaa aggtcgcccg acgcccgggc tttgcccggg |
| 4741 | cggcctcagt gagcgagcga gcgcgcagtt aattaaggcg ccctaggccg acccttagac |
| 4801 | tctgtactca gttctataaa cgagccattg gatacgagat ccgtagattg ataagggaca |
| 4861 | cggaatatcc ccggacgcaa tagacaccgg tggacagctt ggtatcctga gcacagtcgc |
| 4921 | gcgtccgaat ctagctctac tttagaggcc ccggattctg atggtcgtag accgcagaac |
| 4981 | cgattggggg gatgagatct actagttatc agcacacaat tgcccattat acgcgcgtat |
| 5041 | aatggactat tgtgtgctga tatagggata acagggtaat tctagagcta gcatatggat |
| 5101 | ccatcgattt gatgcggtat tttctcctta cgcatctgtg cggtatttca caccgcatac |
| 5161 | gtcaaagcaa ccatagtacg cgccctgtag cggcgcatta agcgcggcgg gtgtggtggt |
| 5221 | tacgcgcagc gtgaccgcta cacttgccag cgccctagcg cccgctcctt tcgctttctt |
| 5281 | cccttccttt ctcgccacgt tcgccggctt tccccgtcaa gctctaaatc gggggctccc |
| 5341 | tttagggttc cgatttagtg ctttacggca cctcgacccc aaaaaacttg atttgggtga |
| 5401 | tggttcacgt agtgggccat cgccctgata gacggttttt cgccctttga cgttggagtc |
| 5461 | cacgttcttt aatagtggac tcttgttcca aactggaaca acactcaact ctatctcggg |
| 5521 | ctattctttt gatttataag ggattttgcc gatttcggtc tattggttaa aaaatgagct |
| 5581 | gatttaacaa aaatttaacg cgaattttaa caaaatatta acgtttacaa ttttatggtg |
| 5641 | cactctcagt acaatctgct ctgatgccgc atagttaagc cagccccgac acccgccaac |
| 5701 | acccgctgac gcgccctgac gggcttgtct gctcccggca tccgcttaca gacaagctgt |
| 5761 | gaccgtctcc gggagctgca tgtgtcagag gttttcaccg tcatcaccga aacgcgcgag |
| 5821 | acgaaagggc ctcgtgatac gcctattttt ataggttaat gtcatgataa taatggtttc |
| 5881 | ttagacgtca ggtggcactt ttcggggaaa tgtgcgcgga acccctattt gtttattttt |
| 5941 | ctaaatacat tcaaatatgt atccgctcat gagacaataa ccctgataaa tgcttcaata |
| 6001 | atattgaaaa aggaagagta tgagccatat tcaacgggaa acgtcgaggc cgcgattaaa |
| 6061 | ttccaacatg gatgctgatt tatatgggta taaatgggct cgcgataatg tcgggcaatc |
| 6121 | aggtgcgaca atctatcgct tgtatgggaa gcccgatgcg ccagagttgt ttctgaaaca |
| 6181 | tggcaaaggt agcgttgcca atgatgttac agatgagatg gtcagactaa actggctgac |
| 6241 | ggaatttatg cctcttccga ccatcaagca ttttatccgt actcctgatg atgcatggtt |
| 6301 | actcaccact gcgatccccg gaaaaacagc attccaggta ttagaagaat atcctgattc |
| 6361 | aggtgaaaat attgttgatg cgctggcagt gttcctgcgc cggttgcatt cgattcctgt |
| 6421 | ttgtaattgt ccttttaaca gcgatcgcgt atttcgtctc gctcaggcgc aatcacgaat |
| 6481 | gaataacggt ttggttgatg cgagtgattt tgatgacgag cgtaatggct ggcctgttga |
| 6541 | acaagtctgg aaagaaatgc ataaactttt gccattctca ccggattcag tcgtcactca |
| 6601 | tggtgatttc tcacttgata accttatttt tgacgagggg aaattaatag gttgtattga |
| 6661 | tgttggacga gtcggaatcg cagaccgata ccaggatctt gccatcctat ggaactgcct |
| 6721 | cggtgagttt tctccttcat tacagaaacg gctttttcaa aaatatggta ttgataatcc |
| 6781 | tgatatgaat aaattgcagt ttcatttgat gctcgatgag tttttctaag cgtataatgg |
| 6841 | tctagagcta gcatatggat ccatcgattc cattatacgc ctgtcagacc aagtttactc |
| 6901 | atatatactt tagattgatt taaaacttca tttttaattt aaaaggatct aggtgaagat |
| 6961 | cctttttgat aatctcatga ccaaaatccc ttaacgtgag ttttcgttcc actgagcgtc |
| 7021 | agaccccgta gaaaagatca aaggatcttc ttgagatcct ttttttctgc gcgtaatctg |
| 7081 | ctgcttgcaa acaaaaaaac caccgctacc agcggtggtt tgtttgccgg atcaagagct |
| 7141 | accaactctt tttccgaagg taactggctt cagcagagcg cagataccaa atactgttct |
| 7201 | tctagtgtag ccgtagttag gccaccactt caagaactct gtagcaccgc ctacatacct |
| 7261 | cgctctgcta atcctgttac cagtggctgc tgccagtggc gataagtcgt gtcttaccgg |
| 7321 | gttggactca agacgatagt taccggataa ggcgcagcgg tcgggctgaa cggggggttc |
| 7381 | gtgcacacag cccagcttgg agcgaacgac ctacaccgaa ctgagatacc tacagcgtga |
| 7441 | gctatgagaa agcgccacgc ttcccgaagg gagaaaggcg gacaggtatc cggtaagcgg |
| 7501 | cagggtcgga acaggagagc gcacgaggga gcttccaggg ggaaacgcct ggtatcttta |
| 7561 | tagtcctgtc gggtttcgcc acctctgact tgagcgtcga tttttgtgat gctcgtcagg |
| 7621 | ggggcggagc ctatggaaaa acgccagcaa cgcggccttt ttacggttcc tggccttttg |
| 7681 | ctggcctttt gctcacatgt |

| ITR to ITR sequence of pP110, i.e., amino acids 1-4385 of SEQ ID NO: 502. | |
|---|---|
| (SEQ ID NO: 513) | |
| (SEQ ID NO: 513) | |
| 1 | tgggccactc cctctctgcg cgctcgctcg ctcactgagg ccgcccgggc aaagcccggg |
| 61 | cgtcgggcga cctttggtcg cccggcctca gtgagcgagc gagcgcgcag agagggagtg |
| 121 | gccaactcca tcactagggg ttcctggagg ggtggagtcg tgacgtgaat tacgtcatag |
| 181 | ggttagggag gtcggccgct ctaggagtta atttttaaaa agcagtcaaa agtccaagtg |
| 241 | cccttgcgag catttactct ctctgtttgc tctggttaat aatctcagga gcacaaacat |
| 301 | tccttactag ttctaggagt taatttttaa aaagcagtca aaagtccaag tgcccttgcg |
| 361 | agcatttact ctctctgttt gctctggtta ataatctcag gagcacaaac attccttact |
| 421 | agttctagag cggccgccag tgtgctggaa ttcggctttt ttagggctgg aagctacctt |
| 481 | tgacatcatt tcctctgcga atgcatgtat aatttctaca gaacctatta gaaaggatca |
| 541 | cccagcctct gcttttgtac aactttccct taaaaaactg ccaatcccac tgctgtttgg |
| 601 | cccaatagtg agaacttttt cctgctgcct cttggtgctt ttgcctatgg cccctattct |
| 661 | gcctgctgaa gacactcttg ccagcatgga cttaaacccc tccagctctg acaatcctct |
| 721 | ttctcttttg ttttacatga agggtctggc agccaaagca atcactcaaa gttcaaacct |
| 781 | tatcattttt tgctttgttc ctcttggcct tggttttgta catcagcttt gaaaatacca |
| 841 | tcccagggtt aatgctgggg ttaatttata actgagagtg ctctagttct gcaatacagg |
| 901 | acatgctata aaaatggaaa gatgttgctt tctgagagat cagcttacat gtggtaccga |
| 961 | gctcggatcc actagtaacg gccgccagtg tgctggaatt cggctttcca ggccatctcc |
| 1021 | aaccatggga gtgaggcacc cgccctgctc ccaccggctc ctggccgtct gcgccctcgt |
| 1081 | gtccttggca accgctgcac tcctggggca gcagggagcc agcagaccag ggccccggga |
| 1141 | tgcccaggca caccccggcc gtcccagagc agtgcccaca cagtgcgacg tcccccccaa |
| 1201 | cagccgcttc gattgcgccc ctgacaaggc catcacccag gaacagtgcg aggcccgcgg |
| 1261 | ctgctgctac atccctgcaa agcaggggct gcagggagcc cagatggggc agccctggtg |
| 1321 | cttcttccca cccagctacc ccagctacaa gctggagaac ctgagctcct ctgaaatggg |
| 1381 | ctacacggcc accctgaccc gtaccacccc caccttcttc cccaaggaca tcctgaccct |
| 1441 | gcggctggac gtgatgatgg agactgagaa ccgcctccac ttcacgatca aagatccagc |
| 1501 | taacaggcgc tacgaggtgc ccttggagac cccgcgtgtc cacagccggg caccgtcccc |
| 1561 | actctacagc gtggagttct ccgaggagcc cttcggggtg atcgtgcacc ggcagctgga |
| 1621 | cggccgcgtg ctgctgaaca cgacggtggc gcccctgttc tttgcggacc agttccttca |
| 1681 | gctgtccacc tcgctgccct cgcagtatat cacaggcctc gccgagcacc tcagtcccct |
| 1741 | gatgctcagc accagctgga ccaggatcac cctgtggaac cgggaccttg cgcccacgcc |
| 1801 | cggtgcgaac ctctacgggt ctcacccttt ctacctggcg ctggaggacg gcgggtcggc |
| 1861 | acacggggtg ttcctgctaa acagcaatgc catggatgtg gtcctgcagc cgagccctgc |
| 1921 | ccttagctgg aggtcgacag gtgggatcct ggatgtctac atcttcctgg gcccagagcc |
| 1981 | caagagcgtg gtgcagcagt acctggacgt tgtgggatac ccgttcatgc cgccatactg |
| 2041 | gggcctgggc ttccacctgt gccgctgggg ctactcctcc accgctatca cccgccaggt |
| 2101 | ggtggagaac atgaccaggg cccacttccc cctggacgtc caatggaacg acctggacta |
| 2161 | catggactcc cggagggact tcacgttcaa caaggatggc ttccgggact tcccggccat |
| 2221 | ggtgcaggag ctgcaccagg gcggccggcg ctacatgatg atcgtggatc ctgccatcag |
| 2281 | cagctcgggc cctgccggga gctacaggcc ctacgacgag ggtctgcgga ggggggtttt |
| 2341 | catcaccaac gagaccggcc agccgctgat tgggaaggta tggcccgggt ccactgcctt |
| 2401 | ccccgacttc accaacccca cagccctggc ctggtgggag gacatggtgg ctgagttcca |
| 2461 | tgaccaggtg cccttcgacg gcatgtggat tgacatgaac gagccttcca acttcatcag |
| 2521 | aggctctgag gacggctgcc ccaacaatga gctggagaac ccaccctacg tgcctggggt |
| 2581 | ggttgggggg accctccagg cggccaccat ctgtgcctcc agccaccagt ttctctccac |
| 2641 | acactacaac ctgcacaacc tctacggcct gaccgaagcc atcgcctccc acagggcgct |
| 2701 | ggtgaaggct cgggggacac gcccatttgt gatctcccgc tcgacctttg ctggccacgg |
| 2761 | ccgatacgcc ggccactgga cgggggacgt gtggagctcc tgggagcagc tcgcctcctc |
| 2821 | cgtgccagaa atcctgcagt ttaacctgct gggggtgcct ctggtcgggg ccgacgtctg |
| 2881 | cggcttcctg ggcaacacct cagaggagct gtgtgtgcgc tggacccagc tgggggcctt |
| 2941 | ctaccccttc atgcggaacc acaacagcct gctcagtctg ccccaggagc cgtacagctt |
| 3001 | cagcgagccg gcccagcagg ccatgaggaa ggccctcacc ctgcgctacg cactcctccc |
| 3061 | ccacctctac acactgttcc accaggccca cgtcgcgggg gagaccgtgg cccggcccct |
| 3121 | cttcctggag ttccccaagg actctagcac ctggactgtg gaccaccagc tcctgtgggg |
| 3181 | ggaggccctg ctcatcaccc cagtgctcca ggccgggaag gccgaagtga ctggctactt |
| 3241 | ccccttgggc acatggtacg acctgcagac ggtgccaata gaggcccttg gcagcctccc |
| 3301 | acccccacct gcagctcccc gtgagccagc catccacagc gaggggcagt gggtgacgct |
| 3361 | gccggccccc ctggacacca tcaacgtcca cctccgggct gggtacatca tccccctgca |
| 3421 | gggccctggc ctcacaacca cagagtcccg ccagcagccc atggccctgg ctgtggccct |
| 3481 | gaccaagggt ggagaggccc gaggggagct gttctgggac gatggagaga gcctggaagt |
| 3541 | gctggagcga ggggcctaca cacaggtcat cttcctggcc aggaataaca cgatcgtgaa |
| 3601 | tgagctggta cgtgtgacca gtgagggagc tggcctgcag ctgcagaagg tgactgtcct |
| 3661 | gggcgtggcc acggcgcccc agcaggtcct ctccaacggt gtccctgtct ccaacttcac |
| 3721 | ctacagcccc gacaccaagg tcctggacat ctgtgtctcg ctgttgatgg gagagcagtt |
| 3781 | tctcgtcagc tggtgttagc cgggcggagt gtgttagtct ctccagaggg aggctggttc |
| 3841 | cccagggaag cagagcctgt gtgcgggcag cagctgtgtg cgggcctggg ggttgttaag |
| 3901 | tgcaattatt tttaataaaa ggggcatttg gaaaaaaaaa aaaaaggtag cagtcgacag |
| 3961 | atgaattctg cagatctgtg gcttctagct gcccgggtgg catccctgtg acccctcccc |
| 4021 | agtgcctctc ctggccctgg aagttgccac tccagtgccc accagccttg tcctaataaa |
| 4081 | attaagttgc atcattttgt ctgactaggt gtccttctat aatattatgg ggtggagggg |
| 4141 | ggtggtatgg agcaaggggc aagttgggaa gacaacctga gttgttggga ttccaggcat |
| 4201 | cgagtagata agtagcatgg cgggttaatc attaactaca aggaacccct agtgatggag |
| 4261 | ttggccactc cctctctgcg cgctcgctcg ctcactgagg ccgggcgacc aaaggtcgcc |
| 4321 | cgacgcccgg gctttgcccg ggcggcctca gtgagcgagc gagcgcgcag agagggacag |
| 4381 | atccg |

| ITR to ITR sequence of pP112, i.e., amino acids 1- 4439 of SEQ ID NO: 504. | |
|---|---|
| (SEQ ID NO: 514) | |
| (SEQ ID NO: 514) | |
| 1 | tgggccactc cctctctgcg cgctcgctcg ctcactgagg ccgcccgggc aaagcccggg |
| 61 | cgtcgggcga cctttggtcg cccggcctca gtgagcgagc gagcgcgcag agagggagtg |
| 121 | gccaactcca tcactagggg ttcctggagg ggtggagtcg tgacgtgaat tacgtcatag |
| 181 | ggttagggag gtcggccgct ctaggagtta atttttaaaa agcagtcaaa agtccaagtg |
| 241 | cccttgcgag catttactct ctctgtttgc tctggttaat aatctcagga gcacaaacat |
| 301 | tccttactag ttctaggagt taatttttaa aaagcagtca aaagtccaag tgcccttgcg |
| 361 | agcatttact ctctctgttt gctctggtta ataatctcag gagcacaaac attccttact |
| 421 | agttctagag cggccgccag tgtgctggaa ttcggctttt ttagggctgg aagctacctt |
| 481 | tgacatcatt tcctctgcga atgcatgtat aatttctaca gaacctatta gaaaggatca |
| 541 | cccagcctct gcttttgtac aactttccct taaaaaactg ccaatcccac tgctgtttgg |
| 601 | cccaatagtg agaacttttt cctgctgcct cttggtgctt ttgcctatgg cccctattct |
| 661 | gcctgctgaa gacactcttg ccagcatgga cttaaacccc tccagctctg acaatcctct |
| 721 | ttctcttttg ttttacatga agggtctggc agccaaagca atcactcaaa gttcaaacct |
| 781 | tatcattttt tgctttgttc ctcttggcct tggttttgta catcagcttt gaaaatacca |
| 841 | tcccagggtt aatgctgggg ttaatttata actgagagtg ctctagttct gcaatacagg |
| 901 | acatgctata aaaatggaaa gatgttgctt tctgagagat cagcttacat gtggtaccga |
| 961 | gctcggatcc actagtaacg gccgccagtg tgctggaatt cggctttcca ggccatctcc |
| 1021 | aaccatggga gtgaggcacc cgccctgctc ccaccggctc ctggccgtct gcgccctcgt |
| 1081 | gtccttggca accgctgcac tcctggagtt tgggctgagc tgggtctttc tggtggccct |
| 1141 | gctgaaggga gtccagtgtg agcagcaggg agccagcaga ccagggcccc gggatgccca |
| 1201 | ggcacacccc ggccgtccca gagcagtgcc cacacagtgc gacgtccccc ccaacagccg |
| 1261 | cttcgattgc gcccctgaca aggccatcac ccaggaacag tgcgaggccc gcggctgctg |
| 1321 | ctacatccct gcaaagcagg ggctgcaggg agcccagatg gggcagccct ggtgcttctt |
| 1381 | cccacccagc taccccagct acaagctgga gaacctgagc tcctctgaaa tgggctacac |
| 1441 | ggccaccctg acccgtacca cccccacctt cttccccaag gacatcctga ccctgcggct |
| 1501 | ggacgtgatg atggagactg agaaccgcct ccacttcacg atcaaagatc cagctaacag |
| 1561 | gcgctacgag gtgcccttgg agaccccgcg tgtccacagc cgggcaccgt ccccactcta |
| 1621 | cagcgtggag ttctccgagg agcccttcgg ggtgatcgtg caccggcagc tggacggccg |
| 1681 | cgtgctgctg aacacgacgg tggcgcccct gttctttgcg gaccagttcc ttcagctgtc |
| 1741 | cacctcgctg ccctcgcagt atatcacagg cctcgccgag cacctcagtc ccctgatgct |
| 1801 | cagcaccagc tggaccagga tcaccctgtg gaaccgggac cttgcgccca cgcccggtgc |
| 1861 | gaacctctac gggtctcacc ctttctacct ggcgctggag gacggcgggt cggcacacgg |
| 1921 | ggtgttcctg ctaaacagca atgccatgga tgtggtcctg cagccgagcc ctgcccttag |
| 1981 | ctggaggtcg acaggtggga tcctggatgt ctacatcttc ctgggcccag agcccaagag |
| 2041 | cgtggtgcag cagtacctgg acgttgtggg atacccgttc atgccgccat actggggcct |
| 2101 | gggcttccac ctgtgccgct ggggctactc ctccaccgct atcacccgcc aggtggtgga |
| 2161 | gaacatgacc agggcccact tccccctgga cgtccaatgg aacgacctgg actacatgga |
| 2221 | ctcccggagg gacttcacgt tcaacaagga tggcttccgg gacttcccgg ccatggtgca |
| 2281 | ggagctgcac cagggcggcc ggcgctacat gatgatcgtg gatcctgcca tcagcagctc |
| 2341 | gggccctgcc gggagctaca ggccctacga cgagggtctg cggagggggg ttttcatcac |
| 2401 | caacgagacc ggccagccgc tgattgggaa ggtatggccc gggtccactg ccttccccga |
| 2461 | cttcaccaac cccacagccc tggcctggtg ggaggacatg gtggctgagt tccatgacca |
| 2521 | ggtgcccttc gacggcatgt ggattgacat gaacgagcct tccaacttca tcagaggctc |
| 2581 | tgaggacggc tgccccaaca atgagctgga gaacccaccc tacgtgcctg gggtggttgg |
| 2641 | ggggaccctc caggcggcca ccatctgtgc ctccagccac cagtttctct ccacacacta |
| 2701 | caacctgcac aacctctacg gcctgaccga agccatcgcc tcccacaggg cgctggtgaa |
| 2761 | ggctcggggg acacgcccat ttgtgatctc ccgctcgacc tttgctggcc acggccgata |
| 2821 | cgccggccac tggacggggg acgtgtggag ctcctgggag cagctcgcct cctccgtgcc |
| 2881 | agaaatcctg cagtttaacc tgctgggggt gcctctggtc ggggccgacg tctgcggctt |
| 2941 | cctgggcaac acctcagagg agctgtgtgt gcgctggacc cagctggggg ccttctaccc |
| 3001 | cttcatgcgg aaccacaaca gcctgctcag tctgccccag gagccgtaca gcttcagcga |
| 3061 | gccggcccag caggccatga ggaaggccct caccctgcgc tacgcactcc tcccccacct |
| 3121 | ctacacactg ttccaccagg cccacgtcgc gggggagacc gtggcccggc ccctcttcct |
| 3181 | ggagttcccc aaggactcta gcacctggac tgtggaccac cagctcctgt ggggggaggc |
| 3241 | cctgctcatc accccagtgc tccaggccgg gaaggccgaa gtgactggct acttcccctt |
| 3301 | gggcacatgg tacgacctgc agacggtgcc aatagaggcc cttggcagcc tcccaccccc |
| 3361 | acctgcagct ccccgtgagc cagccatcca cagcgagggg cagtgggtga cgctgccggc |
| 3421 | ccccctggac accatcaacg tccacctccg ggctgggtac atcatccccc tgcagggccc |
| 3481 | tggcctcaca accacagagt cccgccagca gcccatggcc ctggctgtgg ccctgaccaa |
| 3541 | gggtggagag gcccgagggg agctgttctg ggacgatgga gagagcctgg aagtgctgga |
| 3601 | gcgaggggcc tacacacagg tcatcttcct ggccaggaat aacacgatcg tgaatgagct |
| 3661 | ggtacgtgtg accagtgagg gagctggcct gcagctgcag aaggtgactg tcctgggcgt |
| 3721 | ggccacggcg ccccagcagg tcctctccaa cggtgtccct gtctccaact tcacctacag |
| 3781 | ccccgacacc aaggtcctgg acatctgtgt ctcgctgttg atgggagagc agtttctcgt |
| 3841 | cagctggtgt tagccgggcg gagtgtgtta gtctctccag agggaggctg gttccccagg |
| 3901 | gaagcagagc ctgtgtgcgg gcagcagctg tgtgcgggcc tgggggttgt taagtgcaat |
| 3961 | tatttttaat aaaaggggca tttggaaaaa aaaaaaaaag gtagcagtcg acagatgaat |
| 4021 | tctgcagatc tgtggcttct agctgcccgg gtggcatccc tgtgacccct ccccagtgcc |
| 4081 | tctcctggcc ctggaagttg ccactccagt gcccaccagc cttgtcctaa taaaattaag |
| 4141 | ttgcatcatt ttgtctgact aggtgtcctt ctataatatt atggggtgga ggggggtggt |
| 4201 | atggagcaag gggcaagttg ggaagacaac ctgagttgtt gggattccag gcatcgagta |
| 4261 | gataagtagc atggcgggtt aatcattaac tacaaggaac ccctagtgat ggagttggcc |
| 4321 | actccctctc tgcgcgctcg ctcgctcact gaggccgggc gaccaaaggt cgcccgacgc |
| 4381 | ccgggctttg cccgggcggc ctcagtgagc gagcgagcgc gcagagaggg acagatccg |

| ITR to ITR sequence of pP113, i.e., amino acids 1- 4433 of SEQ ID NO: 505. | |
|---|---|
| (SEQ ID NO: 515) | |
| (SEQ ID NO: 515) | |
| 1 | tgggccactc cctctctgcg cgctcgctcg ctcactgagg ccgcccgggc aaagcccggg |
| 61 | cgtcgggcga cctttggtcg cccggcctca gtgagcgagc gagcgcgcag agagggagtg |
| 121 | gccaactcca tcactagggg ttcctggagg ggtggagtcg tgacgtgaat tacgtcatag |
| 181 | ggttagggag gtcggccgct ctaggagtta atttttaaaa agcagtcaaa agtccaagtg |
| 241 | cccttgcgag catttactct ctctgtttgc tctggttaat aatctcagga gcacaaacat |
| 301 | tccttactag ttctaggagt taatttttaa aaagcagtca aaagtccaag tgcccttgcg |
| 361 | agcatttact ctctctgttt gctctggtta ataatctcag gagcacaaac attccttact |
| 421 | agttctagag cggccgccag tgtgctggaa ttcggctttt ttagggctgg aagctacctt |
| 481 | tgacatcatt tcctctgcga atgcatgtat aatttctaca gaacctatta gaaaggatca |
| 541 | cccagcctct gcttttgtac aactttccct taaaaaactg ccaatcccac tgctgtttgg |
| 601 | cccaatagtg agaacttttt cctgctgcct cttggtgctt ttgcctatgg cccctattct |
| 661 | gcctgctgaa gacactcttg ccagcatgga cttaaacccc tccagctctg acaatcctct |
| 721 | ttctcttttg ttttacatga agggtctggc agccaaagca atcactcaaa gttcaaacct |
| 781 | tatcattttt tgctttgttc ctcttggcct tggttttgta catcagcttt gaaaatacca |
| 841 | tcccagggtt aatgctgggg ttaatttata actgagagtg ctctagttct gcaatacagg |
| 901 | acatgctata aaaatggaaa gatgttgctt tctgagagat cagcttacat gtggtaccga |
| 961 | gctcggatcc actagtaacg gccgccagtg tgctggaatt cggctttcca ggccatctcc |
| 1021 | aaccatggga gtgaggcacc cgccctgctc ccaccggctc ctggccgtct gcgccctcgt |
| 1081 | gtccttggca accgctatgg agtttgggct gagctgggtc tttctggtgg ccctgctgaa |
| 1141 | gggagtccag tgtgagcagc agggagccag cagaccaggg ccccgggatg cccaggcaca |
| 1201 | ccccggccgt cccagagcag tgcccacaca gtgcgacgtc ccccccaaca gccgcttcga |
| 1261 | ttgcgcccct gacaaggcca tcacccagga acagtgcgag gcccgcggct gctgctacat |
| 1321 | ccctgcaaag caggggctgc agggagccca gatggggcag ccctggtgct tcttcccacc |
| 1381 | cagctacccc agctacaagc tggagaacct gagctcctct gaaatgggct acacggccac |
| 1441 | cctgacccgt accaccccca ccttcttccc caaggacatc ctgaccctgc ggctggacgt |
| 1501 | gatgatggag actgagaacc gcctccactt cacgatcaaa gatccagcta acaggcgcta |
| 1561 | cgaggtgccc ttggagaccc cgcgtgtcca cagccgggca ccgtccccac tctacagcgt |
| 1621 | ggagttctcc gaggagccct tcggggtgat cgtgcaccgg cagctggacg gccgcgtgct |
| 1681 | gctgaacacg acggtggcgc ccctgttctt tgcggaccag ttccttcagc tgtccacctc |
| 1741 | gctgccctcg cagtatatca caggcctcgc cgagcacctc agtcccctga tgctcagcac |
| 1801 | cagctggacc aggatcaccc tgtggaaccg ggaccttgcg cccacgcccg gtgcgaacct |
| 1861 | ctacgggtct caccctttct acctggcgct ggaggacggc gggtcggcac acggggtgtt |
| 1921 | cctgctaaac agcaatgcca tggatgtggt cctgcagccg agccctgccc ttagctggag |
| 1981 | gtcgacaggt gggatcctgg atgtctacat cttcctgggc ccagagccca agagcgtggt |
| 2041 | gcagcagtac ctggacgttg tgggataccc gttcatgccg ccatactggg gcctgggctt |
| 2101 | ccacctgtgc cgctggggct actcctccac cgctatcacc cgccaggtgg tggagaacat |
| 2161 | gaccagggcc cacttccccc tggacgtcca atggaacgac ctggactaca tggactcccg |
| 2221 | gagggacttc acgttcaaca aggatggctt ccgggacttc ccggccatgg tgcaggagct |
| 2281 | gcaccagggc ggccggcgct acatgatgat cgtggatcct gccatcagca gctcgggccc |
| 2341 | tgccgggagc tacaggccct acgacgaggg tctgcggagg ggggttttca tcaccaacga |
| 2401 | gaccggccag ccgctgattg ggaaggtatg gcccgggtcc actgccttcc ccgacttcac |
| 2461 | caaccccaca gccctggcct ggtgggagga catggtggct gagttccatg accaggtgcc |
| 2521 | cttcgacggc atgtggattg acatgaacga gccttccaac ttcatcagag gctctgagga |
| 2581 | cggctgcccc aacaatgagc tggagaaccc accctacgtg cctggggtgg ttggggggac |
| 2641 | cctccaggcg gccaccatct gtgcctccag ccaccagttt ctctccacac actacaacct |
| 2701 | gcacaacctc tacggcctga ccgaagccat cgcctcccac agggcgctgg tgaaggctcg |
| 2761 | ggggacacgc ccatttgtga tctcccgctc gacctttgct ggccacggcc gatacgccgg |
| 2821 | ccactggacg ggggacgtgt ggagctcctg ggagcagctc gcctcctccg tgccagaaat |
| 2881 | cctgcagttt aacctgctgg gggtgcctct ggtcggggcc gacgtctgcg gcttcctggg |
| 2941 | caacacctca gaggagctgt gtgtgcgctg gacccagctg ggggccttct accccttcat |
| 3001 | gcggaaccac aacagcctgc tcagtctgcc ccaggagccg tacagcttca gcgagccggc |
| 3061 | ccagcaggcc atgaggaagg ccctcaccct gcgctacgca ctcctccccc acctctacac |
| 3121 | actgttccac caggcccacg tcgcggggga gaccgtggcc cggcccctct tcctggagtt |
| 3181 | ccccaaggac tctagcacct ggactgtgga ccaccagctc ctgtgggggg aggccctgct |
| 3241 | catcacccca gtgctccagg ccgggaaggc cgaagtgact ggctacttcc ccttgggcac |
| 3301 | atggtacgac ctgcagacgg tgccaataga ggcccttggc agcctcccac ccccacctgc |
| 3361 | agctccccgt gagccagcca tccacagcga ggggcagtgg gtgacgctgc cggcccccct |
| 3421 | ggacaccatc aacgtccacc tccgggctgg gtacatcatc cccctgcagg gccctggcct |
| 3481 | cacaaccaca gagtcccgcc agcagcccat ggccctggct gtggccctga ccaagggtgg |
| 3541 | agaggcccga ggggagctgt tctgggacga tggagagagc ctggaagtgc tggagcgagg |
| 3601 | ggcctacaca caggtcatct tcctggccag gaataacacg atcgtgaatg agctggtacg |
| 3661 | tgtgaccagt gagggagctg gcctgcagct gcagaaggtg actgtcctgg gcgtggccac |
| 3721 | ggcgccccag caggtcctct ccaacggtgt ccctgtctcc aacttcacct acagccccga |
| 3781 | caccaaggtc ctggacatct gtgtctcgct gttgatggga gagcagtttc tcgtcagctg |
| 3841 | gtgttagccg ggcggagtgt gttagtctct ccagagggag gctggttccc cagggaagca |
| 3901 | gagcctgtgt gcgggcagca gctgtgtgcg ggcctggggg ttgttaagtg caattatttt |
| 3961 | taataaaagg ggcatttgga aaaaaaaaaa aaaggtagca gtcgacagat gaattctgca |
| 4021 | gatctgtggc ttctagctgc ccgggtggca tccctgtgac ccctccccag tgcctctcct |
| 4081 | ggccctggaa gttgccactc cagtgcccac cagccttgtc ctaataaaat taagttgcat |
| 4141 | cattttgtct gactaggtgt ccttctataa tattatgggg tggagggggg tggtatggag |
| 4201 | caaggggcaa gttgggaaga caacctgagt tgttgggatt ccaggcatcg agtagataag |
| 4261 | tagcatggcg ggttaatcat taactacaag gaacccctag tgatggagtt ggccactccc |
| 4321 | tctctgcgcg ctcgctcgct cactgaggcc gggcgaccaa aggtcgcccg acgcccgggc |
| 4381 | tttgcccggg cggcctcagt gagcgagcga gcgcgcagag agggacagat ccg |

### End of Sequences

1. A recombinant adenovirus associated (rAAV) vector comprising in its genome:
a. 5′ and 3′ AAV inverted terminal repeats (ITR) sequences, and
b. located between the 5′ and 3′ ITRs, a heterologous nucleic acid sequence encoding all or a portion of an endogenous GAA signal peptide and a heterologous signal peptide, or a heterologous signal peptide and an alpha-glucosidase (GAA) polypeptide,
wherein the GAA polypeptide comprises amino acid residues 28-952 of SEQ ID NO: 1, 57-952 of SEQ ID NO: 1, or comprises a N-terminal GAA polypeptide fragment comprising amino acids 28, 28-29, 28-30, 28-31, 28-32, or 28-33 of SEQ ID NO: 1 and a deletion of any number of amino acids from the next about 5 amino acids to about 40 amino acids after the N terminal GAA polypeptide fragment of SEQ ID NO: 1, or a functional fragment thereof, and
wherein the nucleic acid sequence encoding the GAA polypeptide can be codon optimized, and wherein the heterologous nucleic acid is operatively linked to a liver-specific promoter.

2. The recombinant AAV vector of claim 1, where the codon optimized nucleic acid sequence encoding the GAA polypeptide is selected from the group consisting of SEQ ID NO: 1-18, or functional fragment thereofs.

3. The recombinant AAV vector of claim 1, wherein the nucleic acid encoding SEQ ID NO: 3 is wildtype.

4. The recombinant AAV vector of claim 1, further comprising at least one of a UTR or a reverse RNA polII terminator sequence.

5. The recombinant AAV vector of claim 1, which comprises the nucleic acid sequence of SEQ ID NO: 23, or a functional variant thereof.

6. The recombinant AAV vector of claim 1, wherein the heterologous nucleic acid sequence encodes a GAA protein comprising a signal peptide fused to the GAA polypeptide, wherein the signal peptide is an endogenous GAA signal peptide, or a heterologous signal peptide, or a combination thereof.

7. The recombinant AAV vector of claim 1, wherein the AAV genome comprises, in the 5′ to 3′ direction:
a. a 5′ ITR,
b. a liver-specific promoter sequence,
c. an 5′ UTR sequence,
d. a nucleic acid encoding a portion or all of the endogenous GAA signal peptide and a heterologous signal peptide or a heterologous signal peptide,
e. a nucleic acid encoding an alpha-glucosidase (GAA) polypeptide, wherein the GAA polypeptide is functionally active,
f. a poly A sequence, and
g. a reverse RNA pol II terminator sequence.

8. The recombinant AAV vector of claim 1, wherein the UTR is 5′ or 3′.

9. The recombinant AAV vector of claim 1, wherein the nucleic acid encoding the heterologous signal peptide is selected from any of: an endogenous GAA signal peptide, a fibronectin signal peptide (FN1), a IL-2 wt signal peptide, modified IL-2 signal peptide, IL2(1-3) signal peptide, IgG signal peptide, a AAT signal peptide, a A2M signal peptide, or a PZP signal peptide, or an active fragment thereof having signal peptide activity.

10. The recombinant AAV vector of any of claim 1 or 9, wherein the nucleic acid sequence encodes a GAA polypeptide having the amino acid sequence of SEQ ID NO: 1, or a polypeptide having at least 80% sequence identity to SEQ ID NO: 1 where amino acid residue 199 is a R (199R), amino acid residue 223 is a H (223H) and amino acid residue 780 is a 1(780I).

11.-16. (canceled)

17. The recombinant AAV vector of claim 7, further comprising at least one polyA sequence located 3′ of the nucleic acid encoding the GAA gene and 5′ of the 3′ ITR sequence.

18. The recombinant AAV vector of claim 17, wherein the heterologous nucleic acid sequence further comprises a 3′ UTR sequence, wherein the 3′ UTR sequence is located 3′ of the nucleic acid encoding the GAA polypeptide and 5′ of the 3′ ITR sequence, or is located between the nucleic acid encoding the GAA polypeptide and the poly A sequence, or RNA pol II terminator sequence.

19.-23. (canceled)

24. The recombinant AAV vector of claim 17, wherein the nucleic acid encoding the GAA polypeptide encodes a GAA polypeptide beginning at any of amino acid residues 35, 40, 50, 57, 60, 68, 69, 70, 72, 74, 779, 790, 791, 792, 793, or 796 of SEQ ID NO: 1 or a sequence 80% identical to SEQ ID NO: 1 where amino acid residue 199 is a R (199R), amino acid residue 223 is a H (223H) and amino acid residue 780 is a 1(780I).

25. (canceled)

26. The recombinant AAV vector of claim 1, wherein the liver specific promoter is selected from any of: SEQ ID NOS: 86, 88, 91-96, 146-150 or 439-441, or a liver specific promoter having at least 80% sequence identity to SEQ ID NOs: 86, 88, 91-96, 146-150 or 439-441.

27.-32. (canceled)

33. The recombinant AAV vector of claim 1, wherein the recombinant AAV vector is selected from the group consisting of: a AAVXL32 vector, a AAVXL32.1 vector, a AAV8 vector, or a haploid AAV8 vector comprising at least one AAV8 capsid protein.

34.-39. (canceled)

40. A pharmaceutical composition comprising the recombinant AAV vector of claim 1 in a pharmaceutically acceptable carrier.

41. A method to treat a subject with Pompe Disease, or a a glycogen storage disease type II (GSD II, Acid Maltase Deficiency) or having a deficiency in alpha-glucosidase (GAA) polypeptide, comprising administering any of the recombinant AAV vector, or the rAAV genome or the nucleic acid sequence of claim 1.

42.-61. (canceled)

The application's sequence listing, which the Patent Office published only in electronic form, follows.

SEQUENCE LISTING (531 sequences)

SEQ ID NO: 1 - protein, 952 aa, synthetic construct
MGVRHPPCSHRLLAVCALVSLATAALLGHILLHDFLLVPRELSGSSPVLEETHPAHQQGASRPGPRDAQAHPGRPRAVPTQCDVPPNSRFDCAPDKAITQEQCEARGCCYIPAKQGLQGAQMGQPWCFFPPSYPSYKLENLSSSEMGYTATLTRTTPTFFPKDILTLRLDVMMETENRLHFTIKDPANRRYEVPLETPRVHSRAPSPLYSVEFSEEPFGVIVHRQLDGRVLLNTTVAPLFFADQFLQLSTSLPSQYITGLAEHLSPLMLSTSWTRITLWNRDLAPTPGANLYGSHPFYLALEDGGSAHGVFLLNSNAMDVVLQPSPALSWRSTGGILDVYIFLGPEPKSVVQQYLDVVGYPFMPPYWGLGFHLCRWGYSSTAITRQVVENMTRAHFPLDVQWNDLDYMDSRRDFTFNKDGFRDFPAMVQELHQGGRRYMMIVDPAISSSGPAGSYRPYDEGLRRGVFITNETGQPLIGKVWPGSTAFPDFTNPTALAWWEDMVAEFHDQVPFDGMWIDMNEPSNFIRGSEDGCPNNELENPPYVPGVVGGTLQAATICASSHQFLSTHYNLHNLYGLTEAIASHRALVKARGTRPFVISRSTFAGHGRYAGHWTGDVWSSWEQLASSVPEILQFNLLGVPLVGADVCGFLGNTSEELCVRWTQLGAFYPFMRNHNSLLSLPQEPYSFSEPAQQAMRKALTLRYALLPHLYTLFHQAHVAGETVARPLFLEFPKDSSTWTVDHQLLWGEALLITPVLQAGKAEVTGYFPLGTWYDLQTVPIEALGSLPPPPAAPREPAIHSEGQWVTLPAPLDTINVHLRAGYIIPLQGPGLTTTESRQQPMALAVALTKGGEARGELFWDDGESLEVLERGAYTQVIFLARNNTIVNELVRVTSEGAGLQLQKVTVLGVATAPQQVLSNGVPVSNFTYSPDTKVLDICVSLLMGEQFLVSWC

SEQ ID NO: 2 - DNA, 2859 bp, synthetic construct
  source 1..2859: mol_type = other DNA
atgggggtgaggcaccctccctgttctcacaggctgctggctgtgtgtgctctggtgtctctggccactgctgccctgctgggccatatcctgctgcatgacttcctgctggtgcctagggagctgtctggcagcagccctgtgctggaagagacccaccctgctcaccagcagggggccagcaggccaggccccagggatgcccaggcccaccctggcagacccagggctgtgcccacccagtgtgatgtgcctcccaacagcagatttgactgtgcccctgataaggccattactcaggaacagtgtgaggccaggggctgctgctatatccctgccaagcagggcctgcagggggcccagatggggcagccctggtgcttcttcccccccagctacccctcttataagctggagaatctgagcagctctgaaatgggctacactgccactctgaccaggactacccccaccttcttccccaaggatattctgactctgaggctggatgtgatgatggagactgagaacaggctgcacttcaccatcaaggaccctgccaacaggaggtatgaggtgcccctggaaactcccagggtgcactctagggcccccagccccctgtattctgtggagttctctgaggagccttttggggtcattgtccacaggcagctggatggcagggtgctgctgaatactactgtggcccctctgttctttgctgaccagttcctgcagctgagcaccagcctgccttctcagtacattactggcctggctgagcatctgagccccctgatgctgagcacctcttggaccagaatcaccctgtggaacagggacctggctcccactcctggggccaacctgtatggcagccaccccttctacctggccctggaggatgggggctctgcccatggggtgttcctgctgaacagcaatgccatggatgtggtgctgcagccctctcctgccctgtcttggagatctactgggggcatcctggatgtgtatatcttcctggggcctgagcccaagtctgtggtgcagcagtacctggatgtggtgggctaccccttcatgcccccctactggggcctgggcttccacctgtgcaggtggggctactcttctactgctatcaccaggcaggtggtggagaacatgaccagggctcacttccctctggatgtgcagtggaatgacctggactacatggactctaggagagacttcacttttaataaggatgggttcagggactttcctgccatggtgcaggagctgcatcaggggggcaggagatatatgatgattgtggaccctgctatttctagctctggccctgctggcagctataggccctatgatgaggggctgaggaggggggtgttcatcactaatgagactggccagcccctgattggcaaggtgtggcctggctctactgccttccctgatttcaccaaccccactgccctggcctggtgggaggatatggtggctgagtttcatgaccaggtgccctttgatggcatgtggattgacatgaatgagcccagcaactttatcaggggctctgaagatggctgccccaacaatgagctggagaaccccccctatgtgcctggggtggtggggggcaccctgcaggctgccaccatctgtgccagcagccaccagttcctgagcacccactataacctgcacaacctgtatggcctgactgaggccattgcctctcacagggccctggtgaaggctagggggactaggccctttgtgatcagcaggtctacttttgctggccatggcaggtatgctgggcactggactggggatgtgtggtctagctgggagcagctggccagctctgtgcctgagatcctgcagtttaatctgctgggggtgcccctggtgggggctgatgtgtgtggcttcctgggcaatacctctgaggagctgtgtgtgaggtggactcagctgggggctttctaccccttcatgagaaaccacaactctctgctgagcctgccccaggagccctattctttttctgagcctgcccagcaggctatgaggaaggccctgactctgaggtatgccctgctgccccacctgtataccctgttccatcaggcccatgtggctggggagactgtggccagacctctgttcctggagttccccaaggatagctctacttggactgtggaccaccagctgctgtggggggaggctctgctgatcacccctgtgctgcaggctgggaaggctgaggtgactggctatttccccctgggcacctggtatgatctgcagactgtgcccattgaggccctgggctctctgccccctccccctgctgcccccagggagcctgccatccactctgagggccagtgggtgaccctgcctgcccctctggacactatcaatgtgcacctgagggctggctacatcatccccctgcagggccctggcctgactaccactgagtctaggcagcagcccatggccctggctgtggctctgaccaaggggggggaggccaggggggagctgttctgggatgatggggagtctctggaggtgctggagaggggggcctacacccaggtgatcttcctggctaggaataacaccattgtcaatgagctggtgagggtgacctctgagggggctggcctgcagctgcagaaggtgactgtgctgggggtggctactgccccccagcaggtgctgagcaatggggtgcctgtgagcaacttcacctatagccctgacaccaaggtgctggacatctgtgtgagcctgctgatgggggagcagttcctggtgagctggtgctaa

SEQ ID NO: 3 - DNA, 2859 bp, synthetic construct; identical to SEQ ID NO: 2
  source 1..2859: mol_type = other DNA

SEQ ID NO: 4 - DNA, 2856 bp, synthetic construct
  source 1..2856: mol_type = other DNA
atgggagtgagacatcctccttgttctcatagactgctggctgtgtgtgctctggtgtctctggctacagctgctctgctgggacatattctgctgcatgattttctgctagtgcctagagagctgtctggatcttctcctgtgctggaggagacacatcctgctcatcagcagggagcttctagacctggacctagagatgctcaggctcatcctggaagacctagagctgtgcctacacagtgtgatgtgcctcctaattctagatttgattgtgctcctgataaggctataacacaggagcagtgtgaggctagaggatgttgttatattcctgctaagcagggactgcagggagctcagatgggacagccttggtgtttttttcctccttcttatccttcttataagctggagaatctgtcttcttctgagatgggatatacagctacactgacaagaacaacacctacattttttcctaaggatattctgacactgagactggatgtgatgatggagacagagaatagactgcattttacaattaaggatcctgctaatagaagatatgaggtgcctctagagacacctagagtgcattctagagctccttctcctctgtattctgtggagttttctgaggagccttttggagtgattgtgcatagacagctggatggaagagtgctgctgaatacaacagtggctcctctgttttttgctgatcagtttctgcagctgtctacatctctgccttctcagtatattacaggactggctgagcatctgtctcctctgatgctgtctacatcttggacaagaattacactgtggaatagagatctggctcctacacctggagctaatctgtatggatctcatcctttttatctggctctggaggatggaggatctgctcatggagtgtttctgctgaattctaatgctatggatgtagtgctgcagccttctcctgctctgtcttggagatctacaggaggaattctggatgtgtatatttttctaggacctgagcctaagtctgtggtgcagcagtatctggatgtagtgggatatccttttatgcctccttattggggactgggatttcatctgtgtagatggggatattcttctacagctattacaagacaggtggttgagaatatgacaagagctcattttcctctggatgtgcagtggaatgatctagattatatggattctagaagagattttacatttaataaggatggatttagagattttcctgctatggtgcaggagctgcatcagggaggaagaagatatatgatgattgtggatcctgctatttcttcttctggacctgctggatcttatagaccttatgatgagggactgagaagaggagtgtttattacaaatgagacaggacagcctctgattggaaaggtgtggcctggatctacagcttttcctgattttacaaatcctacagctctggcttggtgggaggatatggtggctgagtttcatgatcaggtgccttttgatggaatgtggattgatatgaatgagccttctaattttataagaggatctgaggatggatgtcctaataatgagctagagaatcctccttatgtgcctggagtagtgggaggaacactgcaggctgctacaatttgtgcttcttctcatcagtttctgtctacacattataatctgcataatctgtatggactgacagaggctattgcttctcatagagctctggtgaaggctagaggaacaagaccttttgtgatttctagatctacatttgctggacatggaagatatgctggacattggacaggagatgtatggtcttcttgggagcagctagcttcttctgtgcctgagattctgcagtttaatctgctaggagtgcctctggtgggagctgatgtgtgtggatttctgggaaatacatctgaggagctgtgtgtgagatggacacagctgggagctttttatccttttatgagaaatcataattctctgctgtctctgcctcaggagccttattctttttctgagcctgctcagcaggctatgagaaaggctctgacactgagatatgctctgctgcctcatctgtatacactgtttcatcaggctcatgtggctggagagacagtagctagacctctgtttctggagtttcctaaggattcttctacatggacagttgatcatcagctgctgtggggagaggctctgctgattacacctgtgctgcaggctggaaaggctgaggtgacaggatattttcctctgggaacatggtatgatctgcagacagtgcctatagaggctctgggatctctgcctcctcctcctgctgctcctagagagcctgctattcattctgagggacagtgggtgacactgcctgctcctctggatacaattaatgtgcatctgagagctggatatattattcctctgcagggacctggactgacaacaacagagtctagacagcagcctatggctctggctgtggctctgacaaagggaggagaggctagaggagagctgttttgggatgatggagagtctctggaggtgctggagagaggagcttatacacaggtgatttttctggctagaaataatacaattgtgaatgagctggtgagagtgacatctgagggagctggactgcagctgcagaaggtgacagtgctgggagtggctacagctcctcagcaggtgctgtctaatggagtgcctgtgtctaattttacatattctcctgatacaaaggtgctggatatttgtgtgtctctgctgatgggagagcagtttctggtgtcttggtgt

SEQ ID NO: 5 - DNA, 2859 bp, synthetic construct
  source 1..2859: mol_type = other DNA
atgggggtgagacaccccccttgctctcacaggctgctggctgtgtgtgccctggtgagcctggccactgctgctctgctgggccacatcctgctgcatgacttcctgctggtgccaagagagctgtctgggagcagccctgtgctggaggagacccaccctgcccatcagcagggggccagcaggccaggccctagggatgctcaggctcacccagggaggcctagggctgtgcccacccagtgtgatgtgccccctaacagcaggtttgactgtgctccagacaaggccatcacccaggagcagtgtgaggccagaggctgctgctacattcctgctaagcagggcctgcagggggctcagatgggccagccctggtgctttttcccccctagctaccctagctacaagctggagaacctgagcagctctgagatggggtatactgccactctgaccaggaccacccccaccttctttcccaaggatattctgaccctgaggctggatgtgatgatggagactgagaacaggctgcacttcaccatcaaggatcctgccaacaggaggtatgaggtgcctctggaaacccccagggtccacagcagggcccctagccctctgtactctgtggagttctctgaggagccctttggggtgattgtgcataggcagctggatggcagggtgctgctgaataccactgtggcccccctgttctttgctgaccagttcctgcagctgagcacctctctgccctctcagtacatcactggcctggctgagcacctgagccctctgatgctgagcacctcttggaccaggatcaccctgtggaatagggatctggcccctacccctggggccaacctgtatgggagccaccctttctacctggccctggaggatggggggtctgcccatggggtgttcctgctgaacagcaatgccatggatgtggtgctgcagcccagccctgccctgtcttggaggtctactgggggcatcctggatgtgtatatcttcctgggccctgagcccaagtctgtggtgcagcagtacctggatgtggtgggctaccccttcatgcccccctactggggcctgggcttccacctgtgcaggtggggctacagcagcactgccatcaccaggcaggtggtggagaacatgactagggcccacttccccctggatgtgcagtggaatgacctggactacatggactctaggagggatttcacctttaacaaggatgggtttagggacttccctgctatggtgcaggagctgcatcaggggggcaggaggtatatgatgattgtggaccctgccatctctagctctgggcctgctggcagctacaggccctatgatgagggcctgaggaggggggtgttcatcactaatgaaactggccagcccctgattgggaaggtgtggcctggctctactgctttccctgacttcaccaaccccactgccctggcctggtgggaggacatggtggctgagttccatgatcaggtgccctttgatggcatgtggattgacatgaatgagcctagcaacttcattaggggctctgaggatggctgccccaacaatgagctggagaaccccccctatgtgcctggggtggtgggggggactctgcaggctgccactatttgtgcttcttctcaccagtttctgagcacccactataacctgcataacctgtatgggctgactgaggctattgccagccacagggccctggtgaaggccaggggcactaggccttttgtgatctctaggagcacctttgctggccatggcaggtatgctggccattggactggggatgtgtggagcagctgggagcagctggccagctctgtccctgagatcctgcagtttaatctgctgggggtgcccctggtgggggctgatgtgtgtggcttcctgggcaacacctctgaagagctgtgtgtgaggtggacccagctgggggccttctaccccttcatgaggaaccacaatagcctgctgagcctgccccaggagccctacagcttttctgagccagcccagcaggccatgaggaaggccctgaccctgaggtatgccctgctgcctcacctgtacaccctgttccaccaggcccatgtggctggggagactgtggccaggcccctgttcctggagtttcccaaagatagcagcacctggactgtggaccaccagctgctgtggggggaggccctgctgatcaccccagtgctgcaggctgggaaggctgaggtgactgggtacttccccctgggcacctggtatgacctgcagactgtgcctattgaggctctgggcagcctgccccctccccctgctgcccccagagagcctgccatccattctgaggggcagtgggtgactctgcctgcccccctggacaccatcaatgtgcacctgagagctgggtatatcatccccctgcagggccctgggctgaccactactgagtctaggcagcagcccatggctctggctgtggccctgactaaggggggggaggctaggggggagctgttctgggatgatggggagtctctggaggtgctggagaggggggcctacacccaggtgatcttcctggctaggaacaacaccattgtgaatgagctggtgagggtgacttctgagggggctggcctgcagctgcagaaggtgactgtgctgggggtggccactgccccccagcaggtcctgagcaatggggtgcctgtgagcaacttcacctactctcctgacaccaaggtgctggacatctgtgtgagcctgctgatgggggagcagttcctggtgagctggtgctga

SEQ ID NO: 6 - DNA, 2859 bp, synthetic construct
  source 1..2859: mol_type = other DNA
atgggggtgaggcaccccccctgttctcacaggctgctggctgtgtgtgccctggtgagcctggctactgctgccctgctgggccacatcctgctgcatgacttcctgctggtgcccagggagctgtctggctctagcccagtgctggaggaaacccatcctgcccaccagcagggggccagcaggcctggccctagggatgcccaggctcatcctgggaggcccagggctgtgcccacccagtgtgatgtgcctcccaactctagatttgactgtgcccctgacaaggccatcactcaggagcagtgtgaggccagggggtgctgctacatccctgccaagcaggggctgcagggggcccagatgggccagccttggtgcttcttccctcccagctacccctcttacaagctggagaacctgagcagctctgagatggggtacactgctaccctgactaggaccacccccaccttcttccctaaggatatcctgaccctgagactggatgtgatgatggagactgagaacaggctgcacttcactattaaggaccctgctaacaggaggtatgaggtgcccctggagacccccagggtgcacagcagggcccccagccccctgtactctgtggagttctctgaggagccctttggggtgattgtgcacaggcagctggatggcagagtgctgctgaacaccactgtggctcctctgttctttgctgaccagttcctgcagctgagcactagcctgcccagccagtacatcactgggctggctgagcacctgtctcctctgatgctgagcactagctggactaggatcaccctgtggaacagggacctggcccccactcctggggctaatctgtatggcagccaccctttttacctggccctggaggatggggggtctgcccatggggtgttcctgctgaactctaatgccatggatgtggtgctgcagccctctcctgccctgagctggaggagcactgggggcatcctggatgtgtacatcttcctgggccctgagcccaagtctgtggtgcagcagtatctggatgtggtgggctatccctttatgcccccctattggggcctggggtttcacctgtgcaggtgggggtattcttctactgccatcaccaggcaggtggtggagaacatgaccagggcccacttccccctggatgtgcagtggaatgacctggactatatggacagcaggagggacttcactttcaacaaggatgggttcagggacttccctgctatggtgcaggagctgcaccagggggggaggaggtacatgatgattgtggatcctgccatctctagctctggccctgctggcagctacaggccatatgatgagggcctgaggaggggggtgttcatcaccaatgagactgggcagcctctgattggcaaggtgtggcctggcagcactgctttccctgatttcaccaaccccactgctctggcctggtgggaggacatggtggctgagtttcatgatcaggtgccttttgatgggatgtggattgatatgaatgagcctagcaacttcatcagaggctctgaggatggctgtcccaataatgagctggagaaccccccctatgtgcctggggtggtggggggcaccctgcaggctgctaccatctgtgctagctctcatcagttcctgagcactcactacaacctgcacaacctgtatgggctgactgaggctattgccagccatagggccctggtgaaggccagaggcaccaggccctttgtgatcagcaggagcacctttgctggccatggcaggtatgctggccactggactggggatgtgtggagcagctgggagcagctggcctcttctgtgcctgagatcctgcagttcaacctgctgggggtgcccctggtgggggctgatgtgtgtggcttcctgggcaacacctctgaggagctgtgtgtgaggtggactcagctgggggctttttatcccttcatgaggaaccacaatagcctgctgtctctgccccaggagccctattctttctctgagcctgcccagcaggccatgaggaaggccctgactctgaggtatgccctgctgccccacctgtacaccctgttccaccaggcccatgtggctggggagactgtggccaggcccctgtttctggagttccctaaggacagctctacctggactgtggatcaccagctgctgtggggggaggccctgctgatcactccagtcctgcaggctggcaaagctgaggtgactggctacttccccctgggcacctggtatgacctgcagactgtgcccattgaggctctgggcagcctgccccccccccctgctgctcctagggagcctgccattcactctgagggccagtgggtgactctgcctgctcccctggataccatcaatgtgcatctgagggctggctacatcatccccctgcaggggcctggcctgaccaccactgagagcaggcagcagcccatggccctggctgtggccctgactaaggggggggaggctaggggggagctgttctgggatgatggggagtctctggaagtgctggagaggggggcttacacccaggtgattttcctggccaggaacaacactattgtgaatgagctggtgagggtgacctctgagggggctggcctgcagctgcagaaggtgactgtgctgggggtggccactgccccccagcaggtgctgagcaatggggtgcctgtgagcaactttacctactcccctgataccaaggtgctggacatctgtgtgtctctgctgatgggggaacagtttctggtgtcttggtgctga

SEQ ID NO: 7 - DNA, 2859 bp, synthetic construct
  source 1..2859: mol_type = other DNA
atgggggtgaggcaccccccctgctctcacaggctgctggctgtgtgtgccctggtgagcctggccactgctgctctgctggggcacatcctgctgcatgacttcctgctggtgcccagggagctgtctggcagctctcctgtgctggaggaaactcatcctgcccatcagcagggggcctctaggccaggccccagggatgcccaggcccatcctggcaggcccagagctgtgcccacccagtgtgatgtgccccccaacagcaggtttgattgtgcccctgataaggccatcacccaggagcagtgtgaggccaggggctgctgctacatccctgccaagcaggggctgcagggggcccagatgggccagccctggtgcttcttccccccttcttaccccagctacaagctggagaacctgtcttcttctgagatgggctatactgccaccctgaccaggaccactcccaccttcttccccaaggacatcctgactctgagactggatgtgatgatggagactgagaacaggctgcacttcaccatcaaggaccctgccaacaggaggtatgaggtgcctctggagactcctagagtgcacagcagggctccctctcccctgtactctgtggagttctctgaggagccctttggggtgattgtgcacagacagctggatgggagggtgctgctgaacaccactgtggcccccctgttctttgctgaccagttcctgcagctgtctacctctctgcccagccagtacattactgggctggctgaacatctgtctcccctgatgctgagcaccagctggaccaggatcactctgtggaacagggacctggcccccactcctggggccaatctgtatgggagccacccattctacctggccctggaggatgggggctctgcccatggggtgttcctgctgaacagcaatgccatggatgtggtgctgcagccttcccctgccctgagctggaggtctactgggggcatcctggatgtgtacattttcctgggccctgagcccaagtctgtggtgcagcagtacctggatgtggtggggtaccctttcatgcctccctactggggcctgggctttcacctgtgcaggtggggctattctagcactgccatcaccaggcaggtggtggagaacatgactagggctcatttccccctggatgtgcagtggaatgatctggattatatggactctaggagggactttactttcaataaggatggcttcagggattttcctgctatggtgcaggagctgcaccaggggggcaggaggtatatgatgattgtggatcctgccatctctagctctgggcctgctggctcttacaggccctatgatgaggggctgaggaggggggtgtttattactaatgagactggccagcctctgattgggaaggtgtggcctggcagcactgccttcccagacttcaccaaccccactgccctggcctggtgggaggacatggtggctgagttccatgaccaggtgccctttgatgggatgtggattgatatgaatgagccctctaacttcattaggggctctgaggatggctgccccaacaatgagctggagaaccccccatatgtgcctggggtggtgggggggaccctgcaggctgctaccatctgtgctagctctcaccagttcctgagcacccactacaacctgcacaatctgtatggcctgactgaggccattgccagccatagggccctggtgaaggccagggggaccagaccctttgtgatctccaggagcacctttgctggccatgggagatatgctggccattggactggggatgtgtggtctagctgggagcagctggccagctctgtgcctgagatcctgcagttcaatctgctgggggtgcctctggtgggggctgatgtgtgtggcttcctgggcaacacctctgaagaactgtgtgtgagatggacccagctgggggccttctaccccttcatgaggaaccacaacagcctgctgtctctgccccaggagccttactctttttctgagcctgcccagcaggccatgaggaaggccctgaccctgagatatgccctgctgcctcacctgtacaccctgttccaccaggcccatgtggctggggagactgtggccaggcccctgttcctggagttccccaaggacagcagcacctggactgtggaccaccagctgctgtggggggaggccctgctgatcacccctgtgctgcaggctgggaaggctgaggtgactggctacttccccctgggcacctggtatgatctgcagactgtgcccattgaggccctggggtctctgccccccccccctgctgctcccagagagcctgccatccattctgagggccagtgggtgaccctgcctgcccccctggacaccattaatgtgcacctgagggctggctacattatccccctgcagggccctggcctgaccaccactgagagcaggcagcagcctatggctctggctgtggccctgaccaaggggggggaggccaggggggagctgttttgggatgatggggagagcctggaggtgctggagaggggggcctacacccaggtgatcttcctggccaggaacaacactattgtgaatgaactggtgagggtcacttctgagggggctgggctgcagctgcagaaggtgactgtgctgggggtggccactgctccccagcaggtgctgagcaatggggtgcctgtgagcaacttcacctacagccctgataccaaggtgctggacatctgtgtgagcctgctgatgggggagcagttcctggtgagctggtgctga

SEQ ID NO: 8 - DNA, 2859 bp, synthetic construct
  source 1..2859: mol_type = other DNA
atgggggtgaggcaccctccctgcagccacaggctgctggctgtgtgtgctctggtgagcctggccactgctgccctgctgggccacattctgctgcatgatttcctgctggtgcccagggaactgtctggcagctctcctgtgctggaggagacccatcctgcccaccagcagggggccagcaggcctggccctagggatgctcaggcccatcctggcaggcccagggctgtgcccactcagtgtgatgtgccacccaacagcaggtttgactgtgcccctgacaaggccatcacccaggagcagtgtgaggccaggggctgctgctacatccctgctaagcagggcctgcagggggcccagatggggcagccctggtgcttcttcccccccagctatcccagctataagctggagaacctgagctcttctgagatgggctacactgccaccctgaccaggaccacccccaccttcttccccaaggacatcctgaccctgaggctggatgtgatgatggagactgagaacaggctgcacttcaccatcaaggaccctgccaataggaggtatgaggtgcccctggagacccccagggtgcacagcagggccccctctcccctgtactctgtggagttttctgaagagccctttggggtgattgtgcacaggcagctggatggcagggtgctgctgaacaccactgtggctcccctgttctttgctgaccagttcctgcagctgagcacctctctgcccagccagtatatcactgggctggctgagcatctgagccccctgatgctgagcaccagctggaccaggatcaccctgtggaatagggacctggcccctacccctggggccaacctgtatggcagccaccctttctacctggccctggaggatggggggtctgctcatggggtgttcctgctgaacagcaatgccatggatgtggtgctgcagcccagccctgctctgagctggaggagcactgggggcatcctggatgtgtacatcttcctgggccctgagcctaagtctgtggtgcagcagtacctggatgtggtgggctatcccttcatgcccccctactggggcctgggctttcacctgtgcaggtggggctatagcagcactgccatcaccaggcaggtggtggagaatatgactagggcccatttccccctggatgtgcagtggaatgacctggattacatggacagcaggagggacttcaccttcaataaggatggctttagggactttcctgccatggtgcaggagctgcatcagggggggaggaggtatatgatgattgtggatcctgccatcagcagctctggccctgctggcagctataggccctatgatgagggcctgaggaggggggtgttcattaccaatgagactggccagcctctgattggcaaggtctggcctggctctactgcctttcctgacttcactaaccccactgccctggcctggtgggaggatatggtggctgagttccatgaccaggtgccctttgatggcatgtggattgacatgaatgagccctctaacttcatcaggggctctgaggatggctgccccaataatgagctggagaaccccccctatgtgcctggggtggtggggggcaccctgcaggctgccaccatctgtgccagcagccaccagttcctgagcacccattataatctgcacaacctgtatggcctgactgaggccattgccagccatagggccctggtgaaggctaggggcactaggccttttgtgattagcaggagcacctttgctggccatggcaggtatgctggccactggactggggatgtgtggagcagctgggagcagctggccagctctgtgcctgagattctgcagttcaacctgctgggggtgcccctggtgggggctgatgtgtgtggctttctgggcaacacctctgaggagctgtgtgtgaggtggacccagctgggggccttctacccctttatgaggaatcacaatagcctgctgagcctgccccaggagccctactctttctctgagcctgcccagcaggccatgaggaaggccctgactctgaggtatgccctgctgccccacctgtataccctgttccaccaggcccatgtggctggggagactgtggctaggcctctgttcctggagttccccaaggatagctctacctggactgtggaccaccagctgctgtggggggaggccctgctgatcacccctgtgctgcaggctggcaaggctgaggtgactggctactttcccctgggcacctggtatgacctgcagactgtgcccattgaggccctgggcagcctgcctccccccccagctgccccaagggagcctgccattcactctgagggccagtgggtgaccctgcctgcccccctggacaccatcaatgtgcacctgagggctggctacattatccccctgcagggccctggcctgaccaccactgaatctaggcagcagcccatggccctggctgtggccctgaccaaggggggggaggccaggggggagctgttttgggatgatggggagtctctggaggtgctggagaggggggcctacactcaggtgatcttcctggccaggaataatactattgtgaatgagctggtgagggtgacctctgagggggctggcctgcagctgcagaaggtgactgtgctgggggtggccactgccccccagcaggtgctgagcaatggggtgcctgtgtctaactttacctattctcctgacactaaggtgctggatatctgtgtgtctctgctgatgggggaacagttcctggtgtcttggtgctga

SEQ ID NO: 9 - DNA, 2859 bp, synthetic construct
  source 1..2859: mol_type = other DNA
atgggggtgaggcaccctccctgctctcacaggctgctggctgtgtgtgccctggtgagcctggccactgctgctctgctgggccacatcctgctgcatgacttcctgctggtccctagggagctgtctggctctagccctgtcctggaggagactcacccagcccaccagcagggggccagcaggcctggccccagggatgcccaggcccaccctggcaggcctagggctgtgcccacccagtgtgatgtgccccctaacagcaggtttgattgtgcccctgacaaggccatcacccaggagcagtgtgaggccaggggctgctgctacatccctgccaagcagggcctgcagggggcccagatggggcagccctggtgcttcttccccccctcttaccccagctataagctggagaacctgagctcttctgagatgggctacactgccactctgaccaggactacccctactttcttccccaaggacatcctgaccctgaggctggatgtgatgatggagactgagaacaggctgcactttaccattaaggatcctgccaacaggaggtatgaggtgcccctggagactcccagggtgcatagcagggccccctctcccctgtactctgtggagttctctgaggagccctttggggtgattgtgcacaggcagctggatggcagggtgctgctgaataccactgtggctcccctgttttttgctgaccagtttctgcagctgagcacctctctgcccagccagtatattactggcctggctgagcatctgagccccctgatgctgtctaccagctggaccaggatcactctgtggaacagggatctggcccctacccctggggccaatctgtatggcagccaccctttctacctggccctggaggatggggggtctgctcatggggtgttcctgctgaacagcaatgctatggatgtggtgctgcagccctctcctgctctgagctggagaagcactggggggatcctggatgtgtacatcttcctggggcctgagcccaagtctgtggtgcagcagtacctggatgtggtgggctacccttttatgcctccttattggggcctggggtttcacctgtgcaggtgggggtacagctctactgctatcaccaggcaggtggtggagaacatgaccagggcccacttccccctggatgtgcagtggaatgatctggattacatggactctaggagggacttcaccttcaacaaagatggcttcagggacttccctgccatggtgcaggagctgcaccaggggggcagaaggtatatgatgattgtggatcctgctatcagcagctctgggcctgctggctcttacaggccctatgatgaggggctgaggaggggggtgttcattactaatgaaactggccagcccctgattggcaaggtgtggcctggcagcactgctttccctgacttcactaaccctactgccctggcctggtgggaggacatggtggctgagttccatgaccaggtgccctttgatggcatgtggattgacatgaatgagccctctaattttatcagggggtctgaggatggctgccccaacaatgagctggagaatcccccctatgtgcctggggtggtggggggcaccctgcaggctgccaccatctgtgccagctctcaccagtttctgtctacccactataacctgcacaacctgtatgggctgactgaggccattgccagccacagggccctggtgaaggccaggggcaccaggccctttgtgatcagcaggtctacctttgctggccatgggaggtatgctggccactggactggggatgtgtggagcagctgggagcagctggccagctctgtgcctgagatcctgcagttcaacctgctgggggtgcccctggtgggggctgatgtgtgtggcttcctgggcaacacctctgaggagctgtgtgtgaggtggacccagctgggggctttttatcccttcatgaggaaccacaacagcctgctgagcctgcctcaggagccctacagcttttctgagcctgcccagcaggccatgagaaaggccctgaccctgaggtatgccctgctgccccacctgtataccctgttccaccaggctcatgtggctggggagactgtggccaggcccctgttcctggagttccccaaggacagctctacctggactgtggaccaccagctgctgtggggggaggccctgctgatcacccctgtgctgcaggctggcaaggctgaggtgactggctacttccccctgggcacctggtatgacctgcagactgtgcccattgaggccctgggcagcctgcccccccccccagctgctcctagggagcctgccatccactctgagggccagtgggtgaccctgcctgctcccctggacaccatcaatgtgcacctgagggctggctacatcatccccctgcagggccctgggctgaccaccactgagtctaggcagcagcccatggccctggctgtggccctgaccaaggggggggaggccaggggggagctgttctgggatgatggggagagcctggaggtgctggagaggggggcctacactcaggtgatcttcctggccaggaacaataccattgtgaatgagctggtgagggtgacttctgagggggctggcctgcagctgcagaaggtgactgtgctgggggtggccactgcccctcagcaggtgctgtctaatggggtgcctgtgagcaacttcacttacagccctgacaccaaggtgctggacatctgtgtgagcctgctgatgggggagcagttcctggtgtcttggtgttga

SEQ ID NO: 10 - DNA, 2859 bp, synthetic construct
  source 1..2859: mol_type = other DNA
atgggggtgaggcatcccccctgctctcacaggctgctggctgtgtgtgccctggtgagcctggccactgctgccctgctgggccatatcctgctgcatgacttcctgctggtgcccagggagctgtctggctcttctcctgtgctggaggagactcaccctgcccaccagcagggggccagcaggcctggccctagggatgcccaggctcaccctggcaggcccagggctgtgcccactcagtgtgatgtgccccccaacagcaggtttgactgtgcccctgacaaggctattacccaggagcagtgtgaggccagggggtgttgctacattcctgccaagcagggcctgcagggggcccagatgggccagccctggtgcttcttccctcccagctaccccagctacaagctggagaatctgagcagctctgagatgggctacactgccactctgactaggactactcccacctttttccccaaggatatcctgaccctgaggctggatgtgatgatggagactgagaacaggctgcacttcaccatcaaggatcctgccaacaggaggtatgaggtgcccctggagacccccagggtgcacagcagggcccccagccccctgtactctgtggagttctctgaggagccctttggggtgattgtgcataggcagctggatggcagggtgctgctgaataccactgtggctcccctgttctttgctgatcagttcctgcagctgagcactagcctgccctctcagtacatcactgggctggctgagcacctgagccccctgatgctgtctacttcttggaccaggatcaccctgtggaacagggacctggcccccactcctggggccaacctgtatggcagccaccccttctacctggccctggaggatgggggctctgcccatggggtgtttctgctgaacagcaatgctatggatgtggtgctgcagcctagccctgctctgtcttggaggagcactgggggcatcctggatgtgtatattttcctggggcctgagcccaagtctgtggtgcagcagtacctggatgtggtggggtaccctttcatgcccccctattggggcctgggcttccacctgtgcaggtggggctatagcagcactgccatcaccaggcaggtggtggaaaatatgactagggcccacttccccctggatgtgcagtggaatgacctggactacatggattctaggagggacttcaccttcaacaaggatgggtttagggatttccctgccatggtgcaggagctgcaccaggggggcaggaggtacatgatgattgtggaccctgccatcagcagctctggcccagctggctcttacaggccctatgatgagggcctgaggagaggggtgttcatcaccaatgaaactggccagcccctgattggcaaggtgtggcctggctctactgccttccctgatttcaccaaccccactgccctggcctggtgggaggatatggtggctgaattccatgaccaggtgccctttgatggcatgtggattgacatgaatgagcccagcaactttattaggggctctgaggatgggtgccccaacaatgagctggagaatcccccttatgtgcctggggtggtggggggcactctgcaggctgccaccatctgtgctagcagccaccagttcctgagcactcactacaacctgcataacctgtatggcctgactgaggccattgcttctcacagggctctggtcaaggccagggggaccagaccctttgtgatcagcaggagcacctttgctggccatggcaggtatgctggccactggactggggatgtgtggagcagctgggagcagctggccagctctgtgcctgagattctgcagtttaacctgctgggggtgcccctggtgggggctgatgtgtgtggcttcctggggaacacctctgaggagctgtgtgtgaggtggacccagctgggggctttttacccctttatgaggaaccataatagcctgctgagcctgcctcaggagccctacagcttctctgagcctgcccagcaggccatgaggaaggccctgaccctgaggtatgccctgctgccccatctgtacaccctgtttcaccaggcccatgtggctggggagactgtggccagacccctgttcctggagttcccaaaggactcttctacctggactgtggaccaccagctgctgtggggggaggccctgctgattacccctgtgctgcaggctgggaaggctgaggtgactgggtatttccccctgggcacctggtatgacctgcagactgtgccaattgaggctctgggcagcctgcctcccccccctgctgctcctagggagcctgccattcactctgagggccagtgggtgaccctgccagcccctctggacactatcaatgtgcacctgagggctggctacatcatccccctgcaggggcctggcctgactaccactgagagcaggcagcagcctatggctctggctgtggccctgaccaaggggggggaggccaggggggagctgttctgggatgatggggagtctctggaggtgctggagaggggggcctacacccaggtgatcttcctggccaggaataataccattgtgaatgagctggtgagagtgacttctgagggggctggcctgcagctgcagaaggtgactgtgctgggggtggccactgccccccagcaggtcctgtctaatggggtgcctgtgtctaactttacctacagccctgacaccaaggtgctggacatctgtgtgagcctgctgatgggggagcagttcctggtgagctggtgttga

SEQ ID NO: 11 - DNA, 2859 bp, synthetic construct
  source 1..2859: mol_type = other DNA
atgggggtgaggcaccccccttgctctcacaggctgctggctgtctgtgccctggtgagcctggccactgctgctctgctggggcacatcctgctgcatgattttctgctggtgcccagggagctgtctgggagctctccagtgctggaggagacccaccctgcccaccagcagggggccagcagacctgggcccagggatgctcaggctcaccctggcaggcccagggctgtgcccactcagtgtgatgtgccccccaacagcaggtttgactgtgcccctgacaaggccatcacccaggagcagtgtgaggctaggggctgctgttacatccctgccaagcagggcctgcagggggcccagatgggccagccctggtgcttcttcccccccagctaccccagctacaagctggagaacctgtctagctctgagatgggctatactgctaccctgactaggaccacccctactttcttccccaaggacatcctgaccctgaggctggatgtgatgatggagactgagaataggctgcatttcaccatcaaggaccctgctaacaggaggtatgaagtgcccctggagacccccagggtgcatagcagggccccctctcctctgtactctgtggagttctctgaagagccctttggggtgattgtgcataggcagctggatggcagggtgctgctgaacactactgtggcccccctgttttttgctgaccagttcctgcagctgagcaccagcctgcccagccagtacatcactggcctggctgagcacctgagcccactgatgctgagcaccagctggactaggattaccctgtggaacagggacctggcccccactcctggggccaacctgtatggcagccaccccttctacctggccctggaggatgggggctctgcccatggggtgttcctgctgaacagcaatgccatggatgtggtgctgcagccctctcctgccctgtcttggaggagcactggggggattctggatgtgtacatctttctggggcctgagcccaagtctgtggtgcagcagtacctggatgtggtggggtacccctttatgcctccctattggggcctggggttccatctgtgcaggtgggggtactctagcactgctatcaccaggcaggtggtggagaacatgaccagggcccatttccccctggatgtgcagtggaatgacctggattacatggactctagaagggacttcaccttcaacaaggatggcttcagggatttccctgctatggtgcaggagctgcatcaggggggcaggaggtacatgatgattgtggatcctgccatcagcagctctgggcctgctgggagctataggccttatgatgagggcctgaggaggggggtgtttattaccaatgagactggccagcccctgattggcaaggtgtggccaggcagcactgccttccctgacttcactaaccctactgctctggcctggtgggaggacatggtggctgaatttcatgaccaggtgccctttgatgggatgtggattgacatgaatgagccttctaatttcatcaggggctctgaggatgggtgccccaacaatgagctggagaaccccccctatgtgcctggggtggtggggggcaccctgcaggctgccactatctgtgctagcagccatcagttcctgagcactcactacaatctgcacaacctgtatggcctgactgaggccattgccagccatagggccctggtgaaggctaggggcactaggccctttgtgatcagcaggagcacctttgctggccatgggaggtatgctggccactggactggggatgtgtggagcagctgggagcagctggccagctctgtgcctgagatcctgcagttcaacctgctgggggtgcccctggtgggggctgatgtgtgtggcttcctggggaacacctctgaagagctgtgtgtgaggtggacccagctgggggccttctaccccttcatgaggaatcacaacagcctgctgagcctgcctcaggagccctactctttctctgagcctgcccagcaggccatgaggaaggctctgaccctgaggtatgccctgctgcctcacctgtacaccctgtttcatcaggcccatgtggctggggagactgtggccaggcccctgttcctggagttccccaaggatagcagcacctggactgtggaccaccagctgctgtggggggaagccctgctgatcacccctgtgctgcaggctggcaaggctgaggtgactggctacttccccctgggcacctggtatgacctgcagactgtgcccattgaggccctgggctctctgccccctccccctgctgcccccagggagcctgccatccactctgagggccagtgggtgactctgcctgcccctctggataccattaatgtgcacctgagggctgggtacatcatccctctgcagggccctggcctgactaccactgagagcaggcagcagcctatggccctggctgtggctctgaccaaggggggggaggccaggggggagctgttctgggatgatggggagagcctggaggtgctggagaggggggcttatacccaggtgatcttcctggccaggaacaacaccattgtgaatgagctggtgagggtgacctctgagggggctggcctgcagctgcagaaggtgactgtgctgggggtggccactgcccctcagcaggtgctgagcaatggggtgcctgtgagcaatttcacttacagccctgacaccaaggtgctggatatttgtgtgagcctgctgatgggggagcagttcctggtgtcttggtgctaa

SEQ ID NO: 12 - DNA, 2859 bp, synthetic construct
  source 1..2859: mol_type = other DNA
atgggggtgaggcatcccccctgcagccataggctgctggctgtgtgtgccctggtgagcctggctactgctgccctgctggggcacatcctgctgcatgacttcctgctggtgcccagggaactgtctggcagcagccctgtgctggaggagactcatcctgctcaccagcagggggcctccaggcctggccccagggatgcccaggctcaccctggcaggcccagggctgtgcccactcagtgtgatgtgccccccaacagcaggtttgactgtgcccctgacaaggccatcactcaggagcagtgtgaggccaggggctgctgctatatccctgccaagcaggggctgcagggggcccagatggggcagccttggtgctttttcccccccagctaccccagctacaagctggagaacctgtctagctctgagatgggctatactgccactctgaccaggaccacccccaccttcttccccaaagacattctgaccctgaggctggatgtgatgatggagactgagaataggctgcacttcaccatcaaggaccctgctaacaggaggtatgaggtgcccctggagactcctagggtgcacagcagggcccccagccccctgtattctgtggagttctctgaggagccctttggggtgattgtgcataggcagctggatgggagggtgctgctgaacactactgtggctcccctgttctttgctgaccagttcctgcagctgagcaccagcctgccctctcagtacatcactggcctggctgagcacctgagccccctgatgctgagcaccagctggaccaggatcactctgtggaacagagacctggcccccacccctggggccaacctgtatggcagccatcccttctacctggctctggaggatggggggtctgcccatggggtgtttctgctgaacagcaatgccatggatgtggtgctgcagcccagccctgccctgagctggaggagcactgggggcatcctggatgtgtacattttcctgggccctgaacccaagtctgtggtgcagcagtacctggatgtggtggggtatcccttcatgcctccttactggggcctgggcttccatctgtgcaggtggggctacagcagcactgctatcaccaggcaggtggtggagaacatgaccagggcccatttccccctggatgtgcagtggaatgatctggactacatggactctaggagggacttcactttcaacaaggatggcttcagagatttccctgccatggtgcaggagctgcaccaggggggcagaaggtacatgatgattgtggaccctgccatctctagctctggccctgctgggagctacaggccctatgatgaggggctgaggaggggggtgtttatcaccaatgagactggccagcccctgattggcaaggtgtggcctggcagcactgccttccctgacttcaccaatcccactgccctggcctggtgggaggatatggtggctgagttccatgaccaggtgccctttgatgggatgtggattgacatgaatgagcccagcaactttatcaggggctctgaggatggctgccccaacaatgaactggaaaaccccccctatgtgcctggggtggtggggggcactctgcaggctgccactatctgtgccagcagccaccagttcctgagcacccactacaacctgcacaatctgtatggcctgactgaggccattgccagccacagggccctggtgaaggctaggggcaccaggccctttgtgatcagcaggagcacctttgctggccatggcaggtatgctggccactggactggggatgtgtggagctcttgggagcagctggccagctctgtgcctgagatcctgcagttcaacctgctgggggtgcccctggtgggggctgatgtgtgtggctttctgggcaatacttctgaggagctgtgtgtgaggtggacccagctgggggccttttaccccttcatgaggaaccacaactctctgctgagcctgccccaggaaccctatagcttttctgagcctgcccagcaggccatgaggaaggccctgactctgaggtatgctctgctgccccacctgtacaccctgttccaccaggcccatgtggctggggagactgtggccaggcccctgttcctggagttccccaaggacagcagcacttggactgtggaccaccagctgctgtggggggaggctctgctgatcactcctgtgctgcaggctggcaaggctgaggtgactggctacttccccctggggacttggtatgacctgcagactgtgcctattgaggccctggggagcctgcctcccccccctgctgctcccagggagcctgccatccactctgaggggcagtgggtgactctgcctgctcccctggacactatcaatgtgcacctgagggctgggtacatcatccccctgcagggccctgggctgaccaccactgagtctaggcagcagcccatggctctggctgtggctctgaccaaggggggggaggccaggggggagctgttctgggatgatggggagagcctggaggtgctggagaggggggcctacacccaggtgatcttcctggctagaaacaacaccattgtgaatgagctggtgagggtgacttctgagggggctgggctgcagctgcagaaggtgactgtgctgggggtggctactgccccacagcaggtgctgtctaatggggtgccagtgtctaacttcacctatagccctgatactaaggtgctggacatctgtgtgtctctgctgatgggggagcagttcctggtgtcttggtgctga

SEQ ID NO: 13 - DNA, 2859 bp, synthetic construct
  source 1..2859: mol_type = other DNA
atgggggtgaggcatcctccctgcagccataggctgctggctgtgtgtgccctggtgagcctggctactgctgctctgctggggcacatcctgctgcatgatttcctgctggtgcctagggagctgtctggcagcagccctgtcctggaggagacccaccctgcccatcagcagggggcctctagacctggccccagggatgcccaggcccatcctgggaggcccagggctgtgcccacccagtgtgatgtgcctcccaacagcaggtttgactgtgctcctgacaaagccatcacccaggagcagtgtgaagccaggggctgttgttacattcctgccaagcagggcctgcagggggcccagatgggccagccctggtgcttcttcccccctagctaccccagctacaagctggagaatctgagcagctctgaaatgggctacactgccaccctgactaggaccacccccaccttcttccctaaggatatcctgaccctgaggctggatgtgatgatggagactgagaacaggctgcacttcaccatcaaggatcctgccaacaggaggtatgaggtgcccctggagacccccagggtgcacagcagggctccctctcccctgtattctgtggaattctctgaggagccctttggggtgattgtgcacaggcagctggatggcagagtgctgctgaacactactgtggctcccctgttctttgctgatcagttcctgcagctgagcacttctctgcccagccagtacatcactgggctggctgagcacctgagccctctgatgctgagcaccagctggaccaggatcaccctgtggaacagggacctggctcccacccctggggccaatctgtatggcagccaccccttctacctggctctggaggatgggggctctgcccatggggtgttcctgctgaactctaatgccatggatgtggtgctgcagcccagccctgccctgagctggaggagcactgggggcatcctggatgtgtacatcttcctgggccctgagcccaagtctgtggtccagcagtatctggatgtggtggggtaccctttcatgcccccctactggggcctgggcttccacctgtgcaggtgggggtacagcagcactgccatcaccaggcaggtggtggagaatatgaccagggcccacttccccctggatgtgcagtggaatgatctggactacatggattctaggagggacttcaccttcaacaaggatggcttcagggactttcctgccatggtgcaggagctgcaccaggggggcaggaggtacatgatgattgtggacccagccatctctagctctgggccagctggcagctacaggccctatgatgagggcctgaggaggggggtgttcatcactaatgagactggccagcccctgattggcaaggtgtggcctgggagcactgccttccctgacttcaccaaccccactgccctggcctggtgggaggatatggtggctgagttccatgaccaggtgccctttgatgggatgtggattgacatgaatgagccctctaactttattaggggctctgaggatgggtgccctaacaatgagctggagaaccccccttatgtgcctggggtggtggggggcaccctgcaggctgccaccatctgtgccagcagccaccagttcctgtctacccactacaacctgcacaatctgtatgggctgactgaggctattgccagccacagggccctggtgaaggctagggggaccaggccttttgtgatcagcaggagcacctttgctgggcatggcagatatgctggccattggactggggatgtgtggtctagctgggagcagctggccagctctgtgcctgagatcctgcagttcaatctgctgggggtgcccctggtgggggctgatgtgtgtgggttcctgggcaatacctctgaggagctgtgtgtgaggtggacccagctgggggccttctaccccttcatgaggaaccacaacagcctgctgagcctgcctcaggagccctattctttttctgagcctgcccagcaggctatgaggaaggccctgactctgaggtatgccctgctgcctcacctgtacaccctgttccaccaggcccatgtggctggggagactgtggccaggcccctgttcctggagttccccaaggatagctctacctggactgtggaccatcagctgctgtggggggaggccctgctgatcacccctgtgctgcaggctggcaaggctgaggtgactggctactttcctctgggcacctggtatgatctgcagactgtgcccattgaagccctgggcagcctgcctcctccccctgctgcccctagggagcctgccatccactctgagggccagtgggtgaccctgccagcccctctggacaccatcaatgtgcatctgagggctggctacatcattcccctgcagggccctgggctgaccaccactgagagcaggcagcagcccatggctctggctgtggccctgaccaaggggggggaggccaggggggagctgttctgggatgatggggagagcctggaggtgctggagaggggggcctacacccaggtgatcttcctggccaggaataataccattgtgaatgagctggtgagggtgacttctgagggggctggcctgcagctgcagaaggtgactgtgctgggggtggctactgctcctcagcaggtgctgtctaatggggtgcctgtgagcaacttcacttacagccctgacactaaggtgctggacatttgtgtgagcctgctgatgggggagcagttcctggtgtcttggtgctga

SEQ ID NO: 14 - DNA, 2856 bp, synthetic construct
  source 1..2856: mol_type = other DNA
atgggagtgaggcaccccccctgctcccatagactcctggctgtctgtgccctggtgtccttggcaacagctgcactcctggggcacatcctactccatgatttcctgctggttcccagagagctgagtggctcctccccagtcctggaggagactcacccagctcaccagcagggagccagcagaccagggcccagagatgcccaggcacaccctggcagacccagagcagtgcccacacagtgtgatgtcccccccaacagcagatttgattgtgcccctgacaaggccataacccaggaacagtgtgaggccagaggctgctgctacatccctgcaaagcaggggctgcagggagcccagatggggcagccctggtgcttcttcccacccagctaccccagctacaagctggagaacctgagctcctctgaaatgggctacacagccaccctgaccagaaccacccccaccttcttccccaaggacatcctgaccctgagactggatgtgatgatggagactgagaacagactccacttcaccatcaaagatccagctaacaggagatatgaggtgcccttagagacccctagagtccacagcagagcaccttccccactctactctgtggagttctctgaggagccctttggggtgattgtgcacagacagctggatggcagagtgctgctgaacacaacagtggctcccctgttctttgctgaccagttccttcagctgtccacctctctgccctctcagtatatcacaggcctggctgagcacctcagtcccctgatgctcagcaccagctggaccaggatcaccctgtggaacagagaccttgctcccacacctggtgccaacctctatgggtctcaccctttctacctagctctggaggatggagggtctgcacatggggtgttcctgctaaacagcaatgccatggatgtagtcctgcagcccagccctgcccttagctggaggtctacaggtgggatcctggatgtctacatcttcctaggcccagagcccaagtctgtggtgcagcagtacctggatgtggtaggataccccttcatgcctccatactggggcctgggcttccacctgtgcagatggggctactcctccacagctatcactagacaggtggtggagaacatgaccagggcccacttccccctggatgtccagtggaatgatctagactacatggactccagaagggacttcaccttcaacaaggatggcttcagagacttccctgccatggtgcaggagctgcaccagggaggaagaagatacatgatgattgtggatcctgccatcagcagctctggccctgctgggagctacaggccctatgatgagggtctgagaaggggggttttcatcaccaatgagacaggccagcctctgattgggaaggtgtggccagggtccactgccttcccagacttcaccaaccccacagccctggcctggtgggaggacatggtggctgagttccatgaccaggtgccctttgatggcatgtggattgacatgaatgagccttccaacttcataagaggctctgaggatggctgccccaacaatgagctagagaacccaccctatgtgcctggggtagttggggggaccctccaggctgccaccatctgtgcctccagccaccagtttctctccacacactacaacctgcacaacctctatggcctgacagaagccattgcctcccacagggctctggtgaaggctagagggacaagaccatttgtgatctccagatctacctttgctggccatggcagatatgctggccactggacaggggatgtgtggagctcctgggagcagctagcctcctctgtgccagaaatcctgcagtttaacctgctgggggtgcctctggttggggctgatgtctgtggcttcctgggcaacacctcagaggagctgtgtgtgagatggacccagctgggggccttctaccccttcatgagaaaccataacagcctgctcagtctgccccaggagccttacagcttctctgagcctgcccagcaggccatgaggaaggccctcaccctgagatatgcactcctcccccacctctacacactgttccaccaggcccatgtagcaggggagacagtggccagacccctcttcctggagttccccaaggactctagcacctggactgtggaccaccagctcctgtggggggaggccctgctcatcaccccagtgctccaggctgggaaggctgaagtgactggctacttccccttgggcacatggtatgacctgcagacagtgccaatagaggcccttggcagcctcccacccccacctgcagctcccagagagccagccatccactctgaggggcagtgggtgacactgccagcccccctggacaccatcaatgtgcacctaagagctgggtacatcatccccctgcagggccctggcctcacaaccacagagtccagacagcagcccatggccctggctgtggccctgaccaagggtggagaggccagaggggagctgttctgggatgatggagagagcctagaagtgctggagagaggggcctacacacaggtcatcttcctggccaggaataacacaattgtgaatgagctggtaagagtgaccagtgagggagctggcctgcagctgcagaaggtgactgtcctgggagtggccacagcaccccagcaggtcctctccaatggtgtccctgtctccaacttcacctacagccctgacaccaaggtcctagacatctgtgtcagtctgttgatgggagagcagtttctggtcagctggtgt

SEQ ID NO: 15 - DNA, 2856 bp, synthetic construct
  source 1..2856: mol_type = other DNA
atgggtgttaggcatccaccatgttctcataggcttttagctgtgtgtgctttggtatcactggcaactgctgcacttttaggtcatattctactacatgattttctactagtaccaagggagttatctggttcttctccagttttggaggagactcatcctgctcatcagcagggtgcatcaaggccaggtcctagagatgcacaggcacatcctggtaggccaagggcagttccaacacagtgtgatgtgccaccaaattcaaggtttgattgtgctcctgataaagctataacacaggaacagtgtgaggctaggggatgttgttatataccagctaaacaaggtcttcagggagctcaaatgggacagccttggtgtttttttcctccttcatatccttcatataaattggaaaatctgagttcatctgagatgggttatactgcaacattgactagaactacaccaacattttttcctaaagatatattgacactaagattagatgtgatgatggaaactgaaaatagacttcattttacaattaaagatccagctaatagaaggtatgaggttccattagagacacctagggtgcattctagagctcctagtcctttgtatagtgttgagtttagtgaggaaccatttggtgttatagtgcatagacagctggatggtagagttcttcttaatacaacagtggctcctctattttttgctgatcaatttttgcaattgagtacttctttgccatctcagtatataactggtttagcagaacatttgagtcctttgatgctttctacatcttggacaaggataacattatggaatagggatcttgctcctacacctggtgcaaatctgtatggttctcatccattttatcttgctttagaggatggtggaagtgctcatggtgtgtttttgttgaattctaatgctatggatgtagtgcttcaaccatcaccagctcttagttggagatcaacaggtggaatactggatgtatatatatttttaggtccagaacctaaatctgtggtgcagcaatatttagatgtagtgggttatccttttatgccaccttattggggtcttggatttcatctttgtaggtggggttattcttcaactgcaattacaagacaggtagtggagaatatgactagagctcattttccactggatgtgcagtggaatgatttagattatatggattctaggagggattttacttttaataaagatggttttagagattttcctgcaatggtgcaggaacttcatcagggtggtagaaggtatatgatgattgtggatcctgctatatcaagttctggtcctgcaggaagttataggccttatgatgaaggtcttaggaggggtgtttttataacaaatgagactggtcagcctctgattggaaaagtgtggcctggatcaacagcttttcctgattttacaaatcctactgctttagcttggtgggaggatatggttgcagaatttcatgatcaggtgccttttgatggtatgtggatagatatgaatgaaccatctaattttataagaggatctgaggatggttgtcctaataatgaactggagaatcctccatatgttcctggtgtagtgggtggaacattgcaggctgcaactatatgtgcatcatcacatcagtttctaagtactcattataatcttcataatttgtatggtttgacagaagcaatagcatctcatagagcattggtgaaagctaggggtacaagaccatttgtgatttcaaggtctacatttgcaggacatggtagatatgctggacattggacaggagatgtgtggagttcatgggagcagctagcaagtagtgtgccagaaatattgcagtttaatctgttaggagttccacttgtgggtgctgatgtttgtggttttttaggtaatacaagtgaagagctgtgtgtgagatggactcagcttggtgctttttatccatttatgagaaatcataatagtctactttctcttccacaggaaccatatagtttttctgagcctgctcagcaagcaatgaggaaagcacttactctgaggtatgctcttctgccacatctttatacactttttcatcaggcacatgtagctggagagacagtggcaaggccactatttttggaatttcctaaagattcaagtacatggacagtggatcatcagttgttgtggggtgaagctttacttattacaccagttctgcaagcaggtaaagcagaggtgacaggttattttccactgggtacttggtatgatctgcagacagtgccaatagaagctctgggtagtttgccacctccacctgctgctcctagagaacctgctatacatagtgagggtcagtgggtaacactaccagcaccattggatacaattaatgtgcatttgagggctggatatataatacctttgcaaggtcctggtttaacaactacagagtctaggcagcagccaatggcacttgctgtggcactgacaaaaggtggagaagcaaggggtgagctattttgggatgatggagaatctcttgaagtgttagaaaggggtgcatatactcaggtaatttttttggctaggaataatacaatagtgaatgagctggtaagagtaacatctgaaggagcaggtctgcagttacagaaagtaactgtgctaggagtagctactgcaccacagcaggtattgtctaatggagtacctgtgtctaattttacttatagtccagatacaaaagtgttagatatttgtgtgtctttgctgatgggagagcagtttcttgtgtcatggtgt

SEQ ID NO: 16 - DNA, 2856 bp, synthetic construct
  source 1..2856: mol_type = other DNA
atgggagttaggcatcctccatgttctcataggctgttggcagtatgtgctcttgtgtcactggctactgctgctttactggggcatatactgctgcatgattttttacttgtgcctagggagctgtctggatcttctcctgtactagaggagacacatcctgctcatcagcaaggtgcatcaaggccaggaccaagagatgctcaggctcatcctggaaggcctagagcagtgccaacacaatgtgatgttcctcctaattcaagatttgattgtgcacctgataaagctataacacaagaacagtgtgaggctaggggttgttgttatattcctgcaaaacaagggttgcaaggggcacagatgggacaaccttggtgtttcttcccaccatcttatcctagttataaattggagaatttgtcttcaagtgaaatggggtatacagctacattgacaagaacaactccaacattttttccaaaggatattcttactttgaggctagatgtgatgatggagacagagaataggttgcattttactataaaagatccagctaatagaagatatgaggttcctttagagactccaagggtgcattctagagctccttctcctttgtatagtgtggagttttcagaggaaccatttggtgttattgttcatagacagctggatggtagggtgctgttgaatactacagtagctcctctgttttttgctgatcagtttttacagttgtcaactagtcttccaagtcagtatattacaggtttggcagagcatctatctccattgatgctgtctacaagttggacaagaataacactttggaatagagatctagcacctacacctggagctaatttgtatggatcacatccattttatttggcattggaagatggagggtctgctcatggagtttttttattgaatagtaatgctatggatgtagtgctgcagccttctccagcactaagttggagatctactggtggaattcttgatgtttatatatttttagggcctgaacctaagtctgtggtgcagcaatatttagatgtagttggatatccttttatgcctccttattggggacttggttttcatctttgtagatggggttatagttctactgcaataacaaggcaggtggtggagaatatgacaagagcacattttccacttgatgtgcaatggaatgatttagattatatggattctagaagagattttacttttaataaggatgggtttagagattttccagctatggtacaggaattgcatcagggtggaagaaggtatatgatgatagtggatccagctatttctagttctggtcctgctgggtcttataggccatatgatgaggggctgagaagaggagtgtttattacaaatgaaacagggcaacctctaattgggaaagtgtggcctgggagtactgcttttccagattttacaaatccaacagcacttgcatggtgggaggatatggtggcagagtttcatgatcaagttccttttgatgggatgtggatagatatgaatgagccatcaaattttataaggggttctgaggatggttgtccaaataatgagttggagaatccaccttatgtgccaggtgtagtgggtggaacactgcaggcagcaactatttgtgcatcatctcatcagtttcttagtactcattataatctacataatttgtatggtttgacagaggcaatagcttctcatagggctttggtgaaggctagaggtacaagaccttttgtgatttctagaagtacttttgcagggcatggtagatatgctggacattggacaggggatgtatggtcttcttgggagcaactagcttcatctgtacctgagatattgcagtttaatttgctaggagtgccacttgtgggagctgatgtgtgtggtttcctgggtaatactagtgaggagctgtgtgtgagatggacacagctaggtgctttttatccatttatgaggaatcataattctctgctgtcactgccacaagaaccatattcattttctgaacctgcacagcaagctatgagaaaggcattgactcttagatatgcactgttacctcatctatatacactgtttcatcaggctcatgtagcaggtgaaacagtggcaaggccacttttcctggagttcccaaaggattcttctacttggacagtggatcatcagctattgtggggtgaggcattattgattactcctgtgcttcaagctggaaaagcagaggtgacaggatatttccctttaggaacttggtatgatctgcagactgtgcctatagaggcactgggttcattgcctccaccacctgctgcacctagggaacctgcaattcattctgagggtcagtgggtgacattgccagcacctcttgatacaattaatgtgcatttgagagctggttatattatacctctgcagggtcctgggttgactactactgaatcaagacagcagcctatggctctggcagtggcactgactaagggaggtgaagcaagaggtgaacttttttgggatgatggagagtcattagaagtacttgaaagaggggcatatactcaggtgattttcttggctaggaataatacaattgtgaatgaacttgtgagggtgacatcagagggagcaggtctgcagcttcagaaggtgacagtgcttggagttgctacagctccacagcaagttttaagtaatggagtacctgtgtctaattttacatatagtccagatacaaaagtgctggatatttgtgtgagtttgttgatgggtgagcaatttctagtgagttggtgt

SEQ ID NO: 17 - DNA, 2856 bp, synthetic construct
  source 1..2856: mol_type = other DNA
atgggtgttaggcatccaccatgtagtcataggctgctggcagtttgtgcactggttagtctggcaactgcagcactgctgggtcatattctgctgcatgattttctgctggttccaagggaactgagtggtagtagtccagttctggaagaaactcatccagcacatcaacaaggtgcaagtaggccaggtccaagggatgcacaagcacatccaggtaggccaagggcagttccaactcaatgtgatgttccaccaaatagtaggtttgattgtgcaccagataaagcaataactcaagaacaatgtgaagcaaggggttgttgttatattccagcaaaacaaggtctgcaaggtgcacaaatgggtcaaccatggtgtttttttccaccaagttatccaagttataaactggaaaatctgagtagtagtgaaatgggttatactgcaactctgactaggactactccaactttttttccaaaagatattctgactctgaggctggatgttatgatggaaactgaaaataggctgcattttactattaaagatccagcaaataggaggtatgaagttccactggaaactccaagggttcatagtagggcaccaagtccactgtatagtgtagaatttagtgaagaaccatttggtgttattgttcataggcaactggatggtagggttctgctgaatactactgttgcaccactgttttttgcagatcaatttctgcaactgagtactagtctgccaagtcaatatattactggtctggcagaacatctgagtccactgatgctgagtactagttggactaggattactctgtggaatagggatctggcaccaactccaggtgcaaatctgtatggtagtcatccattttatctggcactggaagatggtggtagtgcacatggtgtttttctgctgaatagtaatgcaatggatgttgttctgcaaccaagtccagcactgagttggaggagtactggtggtattctggatgtttatatttttctaggtccagaaccaaaaagtgttgttcaacaatatctggatgtagttggttatccatttatgccaccatattggggtctgggttttcatctgtgtaggtggggttatagtagtactgcaattactaggcaagttgttgaaaatatgactagggcacattttccactggatgttcaatggaatgatctagattatatggatagtaggagggattttacttttaataaagatggttttagggattttccagcaatggttcaagaactgcatcaaggtggtaggaggtatatgatgattgttgatccagcaattagtagtagtggtccagcaggtagttataggccatatgatgaaggtctgaggaggggtgtttttattactaatgaaactggtcaaccactgattggtaaagtttggccaggtagtactgcatttccagattttactaatccaactgcactggcatggtgggaagatatggttgcagaatttcatgatcaagttccatttgatggtatgtggattgatatgaatgaaccaagtaattttataaggggtagtgaagatggttgtccaaataatgaactagaaaatccaccatatgttccaggtgttgttggtggtactctgcaagcagcaactatttgtgcaagtagtcatcaatttctgagtactcattataatctgcataatctgtatggtctgactgaagcaattgcaagtcatagggcactggttaaagcaaggggtactaggccatttgttattagtaggagtacttttgcaggtcatggtaggtatgcaggtcattggactggtgatgtttggagtagttgggaacaactagcaagtagtgttccagaaattctgcaatttaatctgctgggtgttccactggttggtgcagatgtttgtggttttctaggtaatactagtgaagaactgtgtgttaggtggactcaactgggtgcattttatccatttatgaggaatcataatagtctgctgagtctgccacaagaaccatatagttttagtgaaccagcacaacaagcaatgaggaaagcactgactctgaggtatgcactgctgccacatctgtatactctgtttcatcaagcacatgtagcaggtgaaactgttgcaaggccactgtttctggaatttccaaaagatagtagtacttggactgttgatcatcaactgctgtggggtgaagcactgctgattactccagttctgcaagcaggtaaagcagaagttactggttattttccactgggtacttggtatgatctgcaaactgttccaatagaagcactgggtagtctgccaccaccaccagcagcaccaagggaaccagcaattcatagtgaaggtcaatgggttactctgccagcaccactggatactattaatgttcatctgagggcaggttatattattccactgcaaggtccaggtctgactactactgaaagtaggcaacaaccaatggcactggcagttgcactgactaaaggtggtgaagcaaggggtgaactgttttgggatgatggtgaaagtctagaagttctggaaaggggtgcatatactcaagttatttttctggcaaggaataatactattgttaatgaactagttagggttactagtgaaggtgcaggtctgcaactgcaaaaagttactgttctgggtgttgcaactgcaccacaacaagttctgagtaatggtgttccagttagtaattttacttatagtccagatactaaagttctggatatttgtgttagtctgctgatgggtgaacaatttctggttagttggtgt

SEQ ID NO: 18 - DNA, 2856 bp, synthetic construct
  source 1..2856: mol_type = other DNA
atgggtgtaaggcatcctccatgtagtcataggctgttagctgtatgtgcactggttagtcttgctacagctgctttgctgggacatatactacttcatgattttctgctggtgccaagagagctaagtgggtcttcacctgtattggaggagacacatccagcacatcagcagggggctagtaggcctgggccaagggatgcacaagctcatccagggagacctagagcagttccaacacaatgtgatgtacctcctaattcaaggtttgattgtgcacctgataaagctataactcaggagcaatgtgaggctagaggttgttgttatattcctgctaaacaagggttacaaggggctcaaatggggcaaccttggtgtttttttccaccaagttatccatcatataaacttgagaatctgtcttcaagtgaaatggggtatactgcaactttaacaaggacaacaccaactttttttccaaaagatattctgactcttaggcttgatgtgatgatggaaacagagaataggctgcattttacaattaaagatccagcaaataggagatatgaagtacctctagaaactcctagggtacatagtagagcaccatcaccactttattcagttgaatttagtgaagaaccttttggggtaatagtgcatagacagttagatgggagagtacttctgaatactactgttgctcctttgttttttgcagatcagtttcttcaactttcaactagtcttccaagtcaatatataactggtcttgctgagcatttgagtcctcttatgttgagtacatcttggactaggattactctttggaatagggatctggcaccaactcctggggcaaatttatatggatctcatccattttatttggctttggaagatggaggaagtgctcatggagtatttttgttaaatagtaatgctatggatgtagttctacagccttctcctgctctgtcatggagatcaacaggtgggattttggatgtatatatttttttgggacctgaacctaagagtgttgtgcaacagtatcttgatgttgtagggtatccatttatgccaccatattgggggcttggatttcatctgtgtagatggggatacagttcaactgctataactagacaggttgtggaaaatatgactagagcacattttcctttagatgtgcagtggaatgatctagattacatggatagtagaagagattttacttttaataaggatgggtttagagattttccagcaatggtacaggaactgcatcaagggggaaggaggtatatgatgattgttgaccctgcaattagtagttctggtccagcaggatcttatagaccttatgatgaggggcttaggaggggtgtatttattacaaatgaaacagggcaaccattaattggtaaggtgtggcctggtagtacagcttttcctgattttacaaatccaacagcactggcttggtgggaagatatggtggcagaatttcatgatcaagtgccttttgatgggatgtggattgatatgaatgagccaagtaattttataaggggatctgaggatggatgtccaaataatgagcttgagaatcctccttatgttccaggagttgtaggagggacactgcaagcagcaacaatttgtgctagttcacatcaatttctgagtacacattataatttgcataatctgtatggtttaacagaggcaattgcaagtcatagggcattagtgaaagcaagaggtactaggccatttgtgatttctaggagtacttttgcagggcatggtagatatgctgggcattggacaggagatgtttggagtagttgggaacaactagcatcttctgtacctgagattctacaatttaatcttctgggagtacctttagtgggtgcagatgtatgtggttttctggggaatactagtgaggaattgtgtgtaaggtggactcaattaggagcattttatccttttatgaggaatcataatagtttattaagtcttcctcaagagccatattctttttcagaacctgcacagcaagcaatgagaaaagctcttactctgaggtatgcattgctgccacatctgtatactttatttcatcaagctcatgtggctggggaaactgtagcaagacctctgtttttagagtttccaaaggattctagtacttggacagtggatcatcaactactttggggtgaggctctgcttataactcctgttttgcaggcagggaaggcagaggtgactggttattttccactgggaacatggtatgaccttcaaacagtgccaatagaagcacttggaagtcttccacctcctccagctgctcctagggagcctgctatacatagtgaaggacaatgggttacattacctgcaccattagatactattaatgtgcatctgagagcagggtatattattcctctgcaagggccaggactgactactactgaaagtaggcaacaaccaatggcacttgcagttgctctgacaaaaggtggtgaagcaagaggtgagcttttttgggatgatggagaatcattggaggttctggaaagaggggcatatactcaggttatattcctagctaggaacaatacaatagttaatgagttagtgagggtgacaagtgagggtgctggacttcaattacaaaaagttactgttctgggtgtagcaacagcacctcaacaggttttgagtaatggggtgcctgtaagtaattttacatacagtccagatactaaggtgcttgatatttgtgttagtttgctgatgggagaacaatttttggtaagttggtgc

SEQ ID NO: 19 - DNA, 2778 bp, synthetic construct
  source 1..2778: mol_type = other DNA
ggccatatcctgctgcatgacttcctgctggtgcctagggagctgtctggcagcagccctgtgctggaagagacccaccctgctcaccagcagggggccagcaggccaggccccagggatgcccaggcccaccctggcagacccagggctgtgcccacccagtgtgatgtgcctcccaacagcagatttgactgtgcccctgataaggccattactcaggaacagtgtgaggccaggggctgctgctatatccctgccaagcagggcctgcagggggcccagatggggcagccctggtgcttcttcccccccagctacccctcttataagctggagaatctgagcagctctgaaatgggctacactgccactctgaccaggactacccccaccttcttccccaaggatattctgactctgaggctggatgtgatgatggagactgagaacaggctgcacttcaccatcaaggaccctgccaacaggaggtatgaggtgcccctggaaactcccagggtgcactctagggcccccagccccctgtattctgtggagttctctgaggagccttttggggtcattgtccacaggcagctggatggcagggtgctgctgaatactactgtggcccctctgttctttgctgaccagttcctgcagctgagcaccagcctgccttctcagtacattactggcctggctgagcatctgagccccctgatgctgagcacctcttggaccagaatcaccctgtggaacagggacctggctcccactcctggggccaacctgtatggcagccaccccttctacctggccctggaggatgggggctctgcccatggggtgttcctgctgaacagcaatgccatggatgtggtgctgcagccctctcctgccctgtcttggagatctactgggggcatcctggatgtgtatatcttcctggggcctgagcccaagtctgtggtgcagcagtacctggatgtggtgggctaccccttcatgcccccctactggggcctgggcttccacctgtgcaggtggggctactcttctactgctatcaccaggcaggtggtggagaacatgaccagggctcacttccctctggatgtgcagtggaatgacctggactacatggactctaggagagacttcacttttaataaggatgggttcagggactttcctgccatggtgcaggagctgcatcaggggggcaggagatatatgatgattgtggaccctgctatttctagctctggccctgctggcagctataggccctatgatgaggggctgaggaggggggtgttcatcactaatgagactggccagcccctgattggcaaggtgtggcctggctctactgccttccctgatttcaccaaccccactgccctggcctggtgggaggatatggtggctgagtttcatgaccaggtgccctttgatggcatgtggattgacatgaatgagcccagcaactttatcaggggctctgaagatggctgccccaacaatgagctggagaaccccccctatgtgcctggggtggtggggggcaccctgcaggctgccaccatctgtgccagcagccaccagttcctgagcacccactataacctgcacaacctgtatggcctgactgaggccattgcctctcacagggccctggtgaaggctagggggactaggccctttgtgatcagcaggtctacttttgctggccatggcaggtatgctgggcactggactggggatgtgtggtctagctgggagcagctggccagctctgtgcctgagatcctgcagtttaatctgctgggggtgcccctggtgggggctgatgtgtgtggcttcctgggcaatacctctgaggagctgtgtgtgaggtggactcagctgggggctttctaccccttcatgagaaaccacaactctctgctgagcctgccccaggagccctattctttttctgagcctgcccagcaggctatgaggaaggccctgactctgaggtatgccctgctgccccacctgtataccctgttccatcaggcccatgtggctggggagactgtggccagacctctgttcctggagttccccaaggatagctctacttggactgtggaccaccagctgctgtggggggaggctctgctgatcacccctgtgctgcaggctgggaaggctgaggtgactggctatttccccctgggcacctggtatgatctgcagactgtgcccattgaggccctgggctctctgccccctccccctgctgcccccagggagcctgccatccactctgagggccagtgggtgaccctgcctgcccctctggacactatcaatgtgcacctgagggctggctacatcatccccctgcagggccctggcctgactaccactgagtctaggcagcagcccatggccctggctgtggctctgaccaaggggggggaggccaggggggagctgttctgggatgatggggagtctctggaggtgctggagaggggggcctacacccaggtgatcttcctggctaggaataacaccattgtcaatgagctggtgagggtgacctctgagggggctggcctgcagctgcagaaggtgactgtgctgggggtggctactgccccccagcaggtgctgagcaatggggtgcctgtgagcaacttcacctatagccctgacaccaaggtgctggacatctgtgtgagcctgctgatgggggagcagttcctggtgagctggtgctaa

SEQ ID NO: 20 - DNA, 2775 bp, synthetic construct
  source 1..2775: mol_type = other DNA
ggacatattctgctgcatgattttctgctagtgcctagagagctgtctggatcttctcctgtgctggaggagacacatcctgctcatcagcagggagcttctagacctggacctagagatgctcaggctcatcctggaagacctagagctgtgcctacacagtgtgatgtgcctcctaattctagatttgattgtgctcctgataaggctataacacaggagcagtgtgaggctagaggatgttgttatattcctgctaagcagggactgcagggagctcagatgggacagccttggtgtttttttcctccttcttatccttcttataagctggagaatctgtcttcttctgagatgggatatacagctacactgacaagaacaacacctacattttttcctaaggatattctgacactgagactggatgtgatgatggagacagagaatagactgcattttacaattaaggatcctgctaatagaagatatgaggtgcctctagagacacctagagtgcattctagagctccttctcctctgtattctgtggagttttctgaggagccttttggagtgattgtgcatagacagctggatggaagagtgctgctgaatacaacagtggctcctctgttttttgctgatcagtttctgcagctgtctacatctctgccttctcagtatattacaggactggctgagcatctgtctcctctgatgctgtctacatcttggacaagaattacactgtggaatagagatctggctcctacacctggagctaatctgtatggatctcatcctttttatctggctctggaggatggaggatctgctcatggagtgtttctgctgaattctaatgctatggatgtagtgctgcagccttctcctgctctgtcttggagatctacaggaggaattctggatgtgtatatttttctaggacctgagcctaagtctgtggtgcagcagtatctggatgtagtgggatatccttttatgcctccttattggggactgggatttcatctgtgtagatggggatattcttctacagctattacaagacaggtggttgagaatatgacaagagctcattttcctctggatgtgcagtggaatgatctagattatatggattctagaagagattttacatttaataaggatggatttagagattttcctgctatggtgcaggagctgcatcagggaggaagaagatatatgatgattgtggatcctgctatttcttcttctggacctgctggatcttatagaccttatgatgagggactgagaagaggagtgtttattacaaatgagacaggacagcctctgattggaaaggtgtggcctggatctacagcttttcctgattttacaaatcctacagctctggcttggtgggaggatatggtggctgagtttcatgatcaggtgccttttgatggaatgtggattgatatgaatgagccttctaattttataagaggatctgaggatggatgtcctaataatgagctagagaatcctccttatgtgcctggagtagtgggaggaacactgcaggctgctacaatttgtgcttcttctcatcagtttctgtctacacattataatctgcataatctgtatggactgacagaggctattgcttctcatagagctctggtgaaggctagaggaacaagaccttttgtgatttctagatctacatttgctggacatggaagatatgctggacattggacaggagatgtatggtcttcttgggagcagctagcttcttctgtgcctgagattctgcagtttaatctgctaggagtgcctctggtgggagctgatgtgtgtggatttctgggaaatacatctgaggagctgtgtgtgagatggacacagctgggagctttttatccttttatgagaaatcataattctctgctgtctctgcctcaggagccttattctttttctgagcctgctcagcaggctatgagaaaggctctgacactgagatatgctctgctgcctcatctgtatacactgtttcatcaggctcatgtggctggagagacagtagctagacctctgtttctggagtttcctaaggattcttctacatggacagttgatcatcagctgctgtggggagaggctctgctgattacacctgtgctgcaggctggaaaggctgaggtgacaggatattttcctctgggaacatggtatgatctgcagacagtgcctatagaggctctgggatctctgcctcctcctcctgctgctcctagagagcctgctattcattctgagggacagtgggtgacactgcctgctcctctggatacaattaatgtgcatctgagagctggatatattattcctctgcagggacctggactgacaacaacagagtctagacagcagcctatggctctggctgtggctctgacaaagggaggagaggctagaggagagctgttttgggatgatggagagtctctggaggtgctggagagaggagcttatacacaggtgatttttctggctagaaataatacaattgtgaatgagctggtgagagtgacatctgagggagctggactgcagctgcagaaggtgacagtgctgggagtggctacagctcctcagcaggtgctgtctaatggagtgcctgtgtctaattttacatattctcctgatacaaaggtgctggatatttgtgtgtctctgctgatgggagagcagtttctggtgtcttggtgt

SEQ ID NO: 21 - DNA, 2691 bp, synthetic construct
  source 1..2691: mol_type = other DNA
cagcagggggccagcaggccaggccccagggatgcccaggcccaccctggcagacccagggctgtgcccacccagtgtgatgtgcctcccaacagcagatttgactgtgcccctgataaggccattactcaggaacagtgtgaggccaggggctgctgctatatccctgccaagcagggcctgcagggggcccagatggggcagccctggtgcttcttcccccccagctacccctcttataagctggagaatctgagcagctctgaaatgggctacactgccactctgaccaggactacccccaccttcttccccaaggatattctgactctgaggctggatgtgatgatggagactgagaacaggctgcacttcaccatcaaggaccctgccaacaggaggtatgaggtgcccctggaaactcccagggtgcactctagggcccccagccccctgtattctgtggagttctctgaggagccttttggggtcattgtccacaggcagctggatggcagggtgctgctgaatactactgtggcccctctgttctttgctgaccagttcctgcagctgagcaccagcctgccttctcagtacattactggcctggctgagcatctgagccccctgatgctgagcacctcttggaccagaatcaccctgtggaacagggacctggctcccactcctggggccaacctgtatggcagccaccccttctacctggccctggaggatgggggctctgcccatggggtgttcctgctgaacagcaatgccatggatgtggtgctgcagccctctcctgccctgtcttggagatctactgggggcatcctggatgtgtatatcttcctggggcctgagcccaagtctgtggtgcagcagtacctggatgtggtgggctaccccttcatgcccccctactggggcctgggcttccacctgtgcaggtggggctactcttctactgctatcaccaggcaggtggtggagaacatgaccagggctcacttccctctggatgtgcagtggaatgacctggactacatggactctaggagagacttcacttttaataaggatgggttcagggactttcctgccatggtgcaggagctgcatcaggggggcaggagatatatgatgattgtggaccctgctatttctagctctggccctgctggcagctataggccctatgatgaggggctgaggaggggggtgttcatcactaatgagactggccagcccctgattggcaaggtgtggcctggctctactgccttccctgatttcaccaaccccactgccctggcctggtgggaggatatggtggctgagtttcatgaccaggtgccctttgatggcatgtggattgacatgaatgagcccagcaactttatcaggggctctgaagatggctgccccaacaatgagctggagaaccccccctatgtgcctggggtggtggggggcaccctgcaggctgccaccatctgtgccagcagccaccagttcctgagcacccactataacctgcacaacctgtatggcctgactgaggccattgcctctcacagggccctggtgaaggctagggggactaggccctttgtgatcagcaggtctacttttgctggccatggcaggtatgctgggcactggactggggatgtgtggtctagctgggagcagctggccagctctgtgcctgagatcctgcagtttaatctgctgggggtgcccctggtgggggctgatgtgtgtggcttcctgggcaatacctctgaggagctgtgtgtgaggtggactcagctgggggctttctaccccttcatgagaaaccacaactctctgctgagcctgccccaggagccctattctttttctgagcctgcccagcaggctatgaggaaggccctgactctgaggtatgccctgctgccccacctgtataccctgttccatcaggcccatgtggctggggagactgtggccagacctctgttcctggagttccccaaggatagctctacttggactgtggaccaccagctgctgtggggggaggctctgctgatcacccctgtgctgcaggctgggaaggctgaggtgactggctatttccccctgggcacctggtatgatctgcagactgtgcccattgaggccctgggctctctgccccctccccctgctgcccccagggagcctgccatccactctgagggccagtgggtgaccctgcctgcccctctggacactatcaatgtgcacctgagggctggctacatcatccccctgcagggccctggcctgactaccactgagtctaggcagcagcccatggccctggctgtggctctgaccaaggggggggaggccaggggggagctgttctgggatgatggggagtctctggaggtgctggagaggggggcctacacccaggtgatcttcctggctaggaataacaccattgtcaatgagctggtgagggtgacctctgagggggctggcctgcagctgcagaaggtgactgtgctgggggtggctactgccccccagcaggtgctgagcaatggggtgcctgtgagcaacttcacctatagccctgacaccaaggtgctggacatctgtgtgagcctgctgatgggggagcagttcctggtgagctggtgctaa

SEQ ID NO: 22 - DNA, 2871 bp, synthetic construct
  source 1..2871: mol_type = other DNA
atgcttaggggtccggggcccgggctgctgctgctggccgtccagtgcctggggacagcggtgccctccacgggagcctcgaagagcaagaggggccatatcctgctgcatgacttcctgctggtgcctagggagctgtctggcagcagccctgtgctggaagagacccaccctgctcaccagcagggggccagcaggccaggccccagggatgcccaggcccaccctggcagacccagggctgtgcccacccagtgtgatgtgcctcccaacagcagatttgactgtgcccctgataaggccattactcaggaacagtgtgaggccaggggctgctgctatatccctgccaagcagggcctgcagggggcccagatggggcagccctggtgcttcttcccccccagctacccctcttataagctggagaatctgagcagctctgaaatgggctacactgccactctgaccaggactacccccaccttcttccccaaggatattctgactctgaggctggatgtgatgatggagactgagaacaggctgcacttcaccatcaaggaccctgccaacaggaggtatgaggtgcccctggaaactcccagggtgcactctagggcccccagccccctgtattctgtggagttctctgaggagccttttggggtcattgtccacaggcagctggatggcagggtgctgctgaatactactgtggcccctctgttctttgctgaccagttcctgcagctgagcaccagcctgccttctcagtacattactggcctggctgagcatctgagccccctgatgctgagcacctcttggaccagaatcaccctgtggaacagggacctggctcccactcctggggccaacctgtatggcagccaccccttctacctggccctggaggatgggggctctgcccatggggtgttcctgctgaacagcaatgccatggatgtggtgctgcagccctctcctgccctgtcttggagatctactgggggcatcctggatgtgtatatcttcctggggcctgagcccaagtctgtggtgcagcagtacctggatgtggtgggctaccccttcatgcccccctactggggcctgggcttccacctgtgcaggtggggctactcttctactgctatcaccaggcaggtggtggagaacatgaccagggctcacttccctctggatgtgcagtggaatgacctggactacatggactctaggagagacttcacttttaataaggatgggttcagggactttcctgccatggtgcaggagctgcatcaggggggcaggagatatatgatgattgtggaccctgctatttctagctctggccctgctggcagctataggccctatgatgaggggctgaggaggggggtgttcatcactaatgagactggccagcccctgattggcaaggtgtggcctggctctactgccttccctgatttcaccaaccccactgccctggcctggtgggaggatatggtggctgagtttcatgaccaggtgccctttgatggcatgtggattgacatgaatgagcccagcaactttatcaggggctctgaagatggctgccccaacaatgagctggagaaccccccctatgtgcctggggtggtggggggcaccctgcaggctgccaccatctgtgccagcagccaccagttcctgagcacccactataacctgcacaacctgtatggcctgactgaggccattgcctctcacagggccctggtgaaggctagggggactaggccctttgtgatcagcaggtctacttttgctggccatggcaggtatgctgggcactggactggggatgtgtggtctagctgggagcagctggccagctctgtgcctgagatcctgcagtttaatctgctgggggtgcccctggtgggggctgatgtgtgtggcttcctgggcaatacctctgaggagctgtgtgtgaggtggactcagctgggggctttctaccccttcatgagaaaccacaactctctgctgagcctgccccaggagccctattctttttctgagcctgcccagcaggctatgaggaaggccctgactctgaggtatgccctgctgccccacctgtataccctgttccatcaggcccatgtggctggggagactgtggccagacctctgttcctggagttccccaaggatagctctacttggactgtggaccaccagctgctgtggggggaggctctgctgatcacccctgtgctgcaggctgggaaggctgaggtgactggctatttccccctgggcacctggtatgatctgcagactgtgcccattgaggccctgggctctctgccccctccccctgctgcccccagggagcctgccatccactctgagggccagtgggtgaccctgcctgcccctctggacactatcaatgtgcacctgagggctggctacatcatccccctgcagggccctggcctgactaccactgagtctaggcagcagcccatggccctggctgtggctctgaccaaggggggggaggccaggggggagctgttctgggatgatggggagtctctggaggtgctggagaggggggcctacacccaggtgatcttcctggctaggaataacaccattgtcaatgagctggtgagggtgacctctgagggggctggcctgcagctgcagaaggtgactgtgctgggggtggctactgccccccagcaggtgctgagcaatggggtgcctgtgagcaacttcacctatagccctgacaccaaggtgctggacatctgtgtgagcctgctgatgggggagcagttcctggtgagctggtgctaa

SEQ ID NO: 23 - DNA, 4799 bp, synthetic construct
  source 1..4799: mol_type = other DNA
ctgcgcgctcgctcgctcactgaggccgcccgggcaaagcccgggcgtcgggcgacctttggtcgcccggcctcagtgagcgagcgagcgcgcagagagggagtggccaactccatcactaggggttccttgtagttaatgattaacccgccatgctacttatctacggcgcgccacgcgttctaggagttaatttttaaaaagcagtcaaaagtccaagtgcccttgcgagcatttactctctctgtttgctctggttaataatctcaggagcacaaacattccttactagttctaggagttaatttttaaaaagcagtcaaaagtccaagtgcccttgcgagcatttactctctctgtttgctctggttaataatctcaggagcacaaacattccttactagttctagagcggccgccagtgtgctggaattcggcttttttagggctggaagctacctttgacatcatttcctctgcgaatgcatgtataatttctacagaacctattagaaaggatcacccagcctctgcttttgtacaactttcccttaaaaaactgccaatcccactgctgtttggcccaatagtgagaactttttcctgctgcctcttggtgcttttgcctatggcccctattctgcctgctgaagacactcttgccagcatggacttaaacccctccagctctgacaatcctctttctcttttgttttacatgaagggtctggcagccaaagcaatcactcaaagttcaaaccttatcattttttgctttgttcctcttggccttggttttgtacatcagctttgaaaataccatcccagggttaatgctggggttaatttataactgagagtgctctagttctgcaatacaggacatgctataaaaatggaaagatgttgctttctgagagatcaggtggattcttgggcatttgcttaagcttggtaccgccaccatgggggtgaggcaccctccctgttctcacaggctgctggctgtgtgtgctctggtgtctctggccactgctgccctgctgggccatatcctgctgcatgacttcctgctggtgcctagggagctgtctggcagcagccctgtgctggaagagacccaccctgctcaccagcagggggccagcaggccaggccccagggatgcccaggcccaccctggcagacccagggctgtgcccacccagtgtgatgtgcctcccaacagcagatttgactgtgcccctgataaggccattactcaggaacagtgtgaggccaggggctgctgctatatccctgccaagcagggcctgcagggggcccagatggggcagccctggtgcttcttcccccccagctacccctcttataagctggagaatctgagcagctctgaaatgggctacactgccactctgaccaggactacccccaccttcttccccaaggatattctgactctgaggctggatgtgatgatggagactgagaacaggctgcacttcaccatcaaggaccctgccaacaggaggtatgaggtgcccctggaaactcccagggtgcactctagggcccccagccccctgtattctgtggagttctctgaggagccttttggggtcattgtccacaggcagctggatggcagggtgctgctgaatactactgtggcccctctgttctttgctgaccagttcctgcagctgagcaccagcctgccttctcagtacattactggcctggctgagcatctgagccccctgatgctgagcacctcttggaccagaatcaccctgtggaacagggacctggctcccactcctggggccaacctgtatggcagccaccccttctacctggccctggaggatgggggctctgcccatggggtgttcctgctgaacagcaatgccatggatgtggtgctgcagccctctcctgccctgtcttggagatctactgggggcatcctggatgtgtatatcttcctggggcctgagcccaagtctgtggtgcagcagtacctggatgtggtgggctaccccttcatgcccccctactggggcctgggcttccacctgtgcaggtggggctactcttctactgctatcaccaggcaggtggtggagaacatgaccagggctcacttccctctggatgtgcagtggaatgacctggactacatggactctaggagagacttcacttttaataaggatgggttcagggactttcctgccatggtgcaggagctgcatcaggggggcaggagatatatgatgattgtggaccctgctatttctagctctggccctgctggcagctataggccctatgatgaggggctgaggaggggggtgttcatcactaatgagactggccagcccctgattggcaaggtgtggcctggctctactgccttccctgatttcaccaaccccactgccctggcctggtgggaggatatggtggctgagtttcatgaccaggtgccctttgatggcatgtggattgacatgaatgagcccagcaactttatcaggggctctgaagatggctgccccaacaatgagctggagaaccccccctatgtgcctggggtggtggggggcaccctgcaggctgccaccatctgtgccagcagccaccagttcctgagcacccactataacctgcacaacctgtatggcctgactgaggccattgcctctcacagggccctggtgaaggctagggggactaggccctttgtgatcagcaggtctacttttgctggccatggcaggtatgctgggcactggactggggatgtgtggtctagctgggagcagctggccagctctgtgcctgagatcctgcagtttaatctgctgggggtgcccctggtgggggctgatgtgtgtggcttcctgggcaatacctctgaggagctgtgtgtgaggtggactcagctgggggctttctaccccttcatgagaaaccacaactctctgctgagcctgccccaggagccctattctttttctgagcctgcccagcaggctatgaggaaggccctgactctgaggtatgccctgctgccccacctgtataccctgttccatcaggcccatgtggctggggagactgtggccagacctctgttcctggagttccccaaggatagctctacttggactgtggaccaccagctgctgtggggggaggctctgctgatcacccctgtgctgcaggctgggaaggctgaggtgactggctatttccccctgggcacctggtatgatctgcagactgtgcccattgaggccctgggctctctgccccctccccctgctgcccccagggagcctgccatccactctgagggccagtgggtgaccctgcctgcccctctggacactatcaatgtgcacctgagggctggctacatcatccccctgcagggccctggcctgactaccactgagtctaggcagcagcccatggccctggctgtggctctgaccaaggggggggaggccaggggggagctgttctgggatgatggggagtctctggaggtgctggagaggggggcctacacccaggtgatcttcctggctaggaataacaccattgtcaatgagctggtgagggtgacctctgagggggctggcctgcagctgcagaaggtgactgtgctgggggtggctactgccccccagcaggtgctgagcaatggggtgcctgtgagcaacttcacctatagccctgacaccaaggtgctggacatctgtgtgagcctgctgatgggggagcagttcctggtgagctggtgctaatttaaatctcgagccgggcggagtgtgttagtctctccagagggaggctggttccccagggaagcagagcctgtgtgcgggcagcagctgtgtgcgggcctgggggttgttaagtgcaattatttttaataaaaggggcatttggaaaaaaaaaaaaaaggtagcagtcgacagatgaattctgcagatctgtggcttctagctgcccgggtggcatccctgtgacccctccccagtgcctctcctggccctggaagttgccactccagtgcccaccagccttgtcctaataaaattaagttgcatcattttgtctgactaggtgtccttctataatattatggggtggaggggggtggtatggagcaaggggcaagttgggaagacaacctgtagggcctgcggggtctattgggaaccaagctggagtgcagtggcacaatcttggctcactgcaatctccgcctcctgggttcaagcgattctcctgcctcagcctcccgagttgttgggattccaggcatgcatgaccaggctcagctaatttttgtttttttggtagagacggggtttcaccatattggccaggctggtctccaactcctaatctcaggtgatctacccaccttggcctcccaaattgctgggattacaggcgtgaaccactgctcccttccctgtccttctgattttaaaaaaaagagaaatgttctggcacctgcacttgcactggggacagcctattttgctagtttgttttgtttcgttttgttttgatggagagcgtatgttgtttaaacgcggccgcgtagataagtagcatggcgggttaatcattaactacaaggaacccctagtgatggagttggccactccctctctgcgcgctcgctcgctcactgaggccgggcgaccaaaggtcgcccgacgcccgggctttgcccgggcggcctcagtgagcgagcgagcgcgcag

SEQ ID NO: 24 - DNA, 4802 bp, synthetic construct
  source 1..4802: mol_type = other DNA
ctgcgcgctcgctcgctcactgaggccgcccgggcaaagcccgggcgtcgggcgacctttggtcgcccggcctcagtgagcgagcgagcgcgcagagagggagtggccaactccatcactaggggttccttgtagttaatgattaacccgccatgctacttatctacggcgcgccacgcgttctaggagttaatttttaaaaagcagtcaaaagtccaagtgcccttgcgagcatttactctctctgtttgctctggttaataatctcaggagcacaaacattccttactagttctaggagttaatttttaaaaagcagtcaaaagtccaagtgcccttgcgagcatttactctctctgtttgctctggttaataatctcaggagcacaaacattccttactagttctagagcggccgccagtgtgctggaattcggcttttttagggctggaagctacctttgacatcatttcctctgcgaatgcatgtataatttctacagaacctattagaaaggatcacccagcctctgcttttgtacaactttcccttaaaaaactgccaatcccactgctgtttggcccaatagtgagaactttttcctgctgcctcttggtgcttttgcctatggcccctattctgcctgctgaagacactcttgccagcatggacttaaacccctccagctctgacaatcctctttctcttttgttttacatgaagggtctggcagccaaagcaatcactcaaagttcaaaccttatcattttttgctttgttcctcttggccttggttttgtacatcagctttgaaaataccatcccagggttaatgctggggttaatttataactgagagtgctctagttctgcaatacaggacatgctataaaaatggaaagatgttgctttctgagagatcaggtggattcttgggcatttgcttaagcttggtaccgccaccatgggagtgagacatcctccttgttctcatagactgctggctgtgtgtgctctggtgtctctggctacagctgctctgctgggacatattctgctgcatgattttctgctagtgcctagagagctgtctggatcttctcctgtgctggaggagacacatcctgctcatcagcagggagcttctagacctggacctagagatgctcaggctcatcctggaagacctagagctgtgcctacacagtgtgatgtgcctcctaattctagatttgattgtgctcctgataaggctataacacaggagcagtgtgaggctagaggatgttgttatattcctgctaagcagggactgcagggagctcagatgggacagccttggtgtttttttcctccttcttatccttcttataagctggagaatctgtcttcttctgagatgggatatacagctacactgacaagaacaacacctacattttttcctaaggatattctgacactgagactggatgtgatgatggagacagagaatagactgcattttacaattaaggatcctgctaatagaagatatgaggtgcctctagagacacctagagtgcattctagagctccttctcctctgtattctgtggagttttctgaggagccttttggagtgattgtgcatagacagctggatggaagagtgctgctgaatacaacagtggctcctctgttttttgctgatcagtttctgcagctgtctacatctctgccttctcagtatattacaggactggctgagcatctgtctcctctgatgctgtctacatcttggacaagaattacactgtggaatagagatctggctcctacacctggagctaatctgtatggatctcatcctttttatctggctctggaggatggaggatctgctcatggagtgtttctgctgaattctaatgctatggatgtagtgctgcagccttctcctgctctgtcttggagatctacaggaggaattctggatgtgtatatttttctaggacctgagcctaagtctgtggtgcagcagtatctggatgtagtgggatatccttttatgcctccttattggggactgggatttcatctgtgtagatggggatattcttctacagctattacaagacaggtggttgagaatatgacaagagctcattttcctctggatgtgcagtggaatgatctagattatatggattctagaagagattttacatttaataaggatggatttagagattttcctgctatggtgcaggagctgcatcagggaggaagaagatatatgatgattgtggatcctgctatttcttcttctggacctgctggatcttatagaccttatgatgagggactgagaagaggagtgtttattacaaatgagacaggacagcctctgattggaaaggtgtggcctggatctacagcttttcctgattttacaaatcctacagctctggcttggtgggaggatatggtggctgagtttcatgatcaggtgccttttgatggaatgtggattgatatgaatgagccttctaattttataagaggatctgaggatggatgtcctaataatgagctagagaatcctccttatgtgcctggagtagtgggaggaacactgcaggctgctacaatttgtgcttcttctcatcagtttctgtctacacattataatctgcataatctgtatggactgacagaggctattgcttctcatagagctctggtgaaggctagaggaacaagaccttttgtgatttctagatctacatttgctggacatggaagatatgctggacattggacaggagatgtatggtcttcttgggagcagctagcttcttctgtgcctgagattctgcagtttaatctgctaggagtgcctctggtgggagctgatgtgtgtggatttctgggaaatacatctgaggagctgtgtgtgagatggacacagctgggagctttttatccttttatgagaaatcataattctctgctgtctctgcctcaggagccttattctttttctgagcctgctcagcaggctatgagaaaggctctgacactgagatatgctctgctgcctcatctgtatacactgtttcatcaggctcatgtggctggagagacagtagctagacctctgtttctggagtttcctaaggattcttctacatggacagttgatcatcagctgctgtggggagaggctctgctgattacacctgtgctgcaggctggaaaggctgaggtgacaggatattttcctctgggaacatggtatgatctgcagacagtgcctatagaggctctgggatctctgcctcctcctcctgctgctcctagagagcctgctattcattctgagggacagtgggtgacactgcctgctcctctggatacaattaatgtgcatctgagagctggatatattattcctctgcagggacctggactgacaacaacagagtctagacagcagcctatggctctggctgtggctctgacaaagggaggagaggctagaggagagctgttttgggatgatggagagtctctggaggtgctggagagaggagcttatacacaggtgatttttctggctagaaataatacaattgtgaatgagctggtgagagtgacatctgagggagctggactgcagctgcagaaggtgacagtgctgggagtggctacagctcctcagcaggtgctgtctaatggagtgcctgtgtctaattttacatattctcctgatacaaaggtgctggatatttgtgtgtctctgctgatgggagagcagtttctggtgtcttggtgttaatgatttaaatctcgagccgggcggagtgtgttagtctctccagagggaggctggttccccagggaagcagagcctgtgtgcgggcagcagctgtgtgcgggcctgggggttgttaagtgcaattatttttaataaaaggggcatttggaaaaaaaaaaaaaaggtagcagtcgacagatgaattctgcagatctgtggcttctagctgcccgggtggcatccctgtgacccctccccagtgcctctcctggccctggaagttgccactccagtgcccaccagccttgtcctaataaaattaagttgcatcattttgtctgactaggtgtccttctataatattatggggtggaggggggtggtatggagcaaggggcaagttgggaagacaacctgtagggcctgcggggtctattgggaaccaagctggagtgcagtggcacaatcttggctcactgcaatctccgcctcctgggttcaagcgattctcctgcctcagcctcccgagttgttgggattccaggcatgcatgaccaggctcagctaatttttgtttttttggtagagacggggtttcaccatattggccaggctggtctccaactcctaatctcaggtgatctacccaccttggcctcccaaattgctgggattacaggcgtgaaccactgctcccttccctgtccttctgattttaaaaaaaagagaaatgttctggcacctgcacttgcactggggacagcctattttgctagtttgttttgtttcgttttgttttgatggagagcgtatgttgtttaaacgcggccgcgtagataagtagcatggcgggttaatcattaactacaaggaacccctagtgatggagttggccactccctctctgcgcgctcgctcgctcactgaggccgggcgaccaaaggtcgcccgacgcccgggctttgcccgggcggcctcagtgagcgagcgagcgcgcag

SEQ ID NO: 25 - DNA, 3559 bp, synthetic construct
  source 1..3559: mol_type = other DNA
atgggggtgaggcaccctccctgttctcacaggctgctggctgtgtgtgctctggtgtctctggccactgctgccctgctgggccatatcctgctgcatgacttcctgctggtgcctagggagctgtctggcagcagccctgtgctggaagagacccaccctgctcaccagcagggggccagcaggccaggccccagggatgcccaggcccaccctggcagacccagggctgtgcccacccagtgtgatgtgcctcccaacagcagatttgactgtgcccctgataaggccattactcaggaacagtgtgaggccaggggctgctgctatatccctgccaagcagggcctgcagggggcccagatggggcagccctggtgcttcttcccccccagctacccctcttataagctggagaatctgagcagctctgaaatgggctacactgccactctgaccaggactacccccaccttcttccccaaggatattctgactctgaggctggatgtgatgatggagactgagaacaggctgcacttcaccatcaaggaccctgccaacaggaggtatgaggtgcccctggaaactcccagggtgcactctagggcccccagccccctgtattctgtggagttctctgaggagccttttggggtcattgtccacaggcagctggatggcagggtgctgctgaatactactgtggcccctctgttctttgctgaccagttcctgcagctgagcaccagcctgccttctcagtacattactggcctggctgagcatctgagccccctgatgctgagcacctcttggaccagaatcaccctgtggaacagggacctggctcccactcctggggccaacctgtatggcagccaccccttctacctggccctggaggatgggggctctgcccatggggtgttcctgctgaacagcaatgccatggatgtggtgctgcagccctctcctgccctgtcttggagatctactgggggcatcctggatgtgtatatcttcctggggcctgagcccaagtctgtggtgcagcagtacctggatgtggtgggctaccccttcatgcccccctactggggcctgggcttccacctgtgcaggtggggctactcttctactgctatcaccaggcaggtggtggagaacatgaccagggctcacttccctctggatgtgcagtggaatgacctggactacatggactctaggagagacttcacttttaataaggatgggttcagggactttcctgccatggtgcaggagctgcatcaggggggcaggagatatatgatgattgtggaccctgctatttctagctctggccctgctggcagctataggccctatgatgaggggctgaggaggggggtgttcatcactaatgagactggccagcccctgattggcaaggtgtggcctggctctactgccttccctgatttcaccaaccccactgccctggcctggtgggaggatatggtggctgagtttcatgaccaggtgccctttgatggcatgtggattgacatgaatgagcccagcaactttatcaggggctctgaagatggctgccccaacaatgagctggagaaccccccctatgtgcctggggtggtggggggcaccctgcaggctgccaccatctgtgccagcagccaccagttcctgagcacccactataacctgcacaacctgtatggcctgactgaggccattgcctctcacagggccctggtgaaggctagggggactaggccctttgtgatcagcaggtctacttttgctggccatggcaggtatgctgggcactggactggggatgtgtggtctagctgggagcagctggccagctctgtgcctgagatcctgcagtttaatctgctgggggtgcccctggtgggggctgatgtgtgtggcttcctgggcaatacctctgaggagctgtgtgtgaggtggactcagctgggggctttctaccccttcatgagaaaccacaactctctgctgagcctgccccaggagccctattctttttctgagcctgcccagcaggctatgaggaaggccctgactctgaggtatgccctgctgccccacctgtataccctgttccatcaggcccatgtggctggggagactgtggccagacctctgttcctggagttccccaaggatagctctacttggactgtggaccaccagctgctgtggggggaggctctgctgatcacccctgtgctgcaggctgggaaggctgaggtgactggctatttccccctgggcacctggtatgatctgcagactgtgcccattgaggccctgggctctctgccccctccccctgctgcccccagggagcctgccatccactctgagggccagtgggtgaccctgcctgcccctctggacactatcaatgtgcacctgagggctggctacatcatccccctgcagggccctggcctgactaccactgagtctaggcagcagcccatggccctggctgtggctctgaccaaggggggggaggccaggggggagctgttctgggatgatggggagtctctggaggtgctggagaggggggcctacacccaggtgatcttcctggctaggaataacaccattgtcaatgagctggtgagggtgacctctgagggggctggcctgcagctgcagaaggtgactgtgctgggggtggctactgccccccagcaggtgctgagcaatggggtgcctgtgagcaacttcacctatagccctgacaccaaggtgctggacatctgtgtgagcctgctgatgggggagcagttcctggtgagctggtgctaatttaaatctcgagccgggcggagtgtgttagtctctccagagggaggctggttccccagggaagcagagcctgtgtgcgggcagcagctgtgtgcgggcctgggggttgttaagtgcaattatttttaataaaaggggcatttggaaaaaaaaaaaaaaggtagcagtcgacagatgaattctgcagatctgtggcttctagctgcccgggtggcatccctgtgacccctccccagtgcctctcctggccctggaagttgccactccagtgcccaccagccttgtcctaataaaattaagttgcatcattttgtctgactaggtgtccttctataatattatggggtggaggggggtggtatggagcaaggggcaagttgggaagacaacctgtagggcctgcggggtctattgggaaccaagctggagtgcagtggcacaatcttggctcactgcaatctccgcctcctgggttcaagcgattctcctgcctcagcctcccgagttgttgggattccaggcatgcatgaccaggctcagctaatttttgtttttttggtagagacggggtttcaccatattggccaggctggtctccaactcctaatctcaggtgatctacccaccttggcctcccaaattgctgggattacaggcgtgaaccactgctcccttccctgtccttctgattttaaaaaaa

SEQ ID NO: 26 - DNA, 3654 bp, synthetic construct
  source 1..3654: mol_type = other DNA
atgggagtgagacatcctccttgttctcatagactgctggctgtgtgtgctctggtgtctctggctacagctgctctgctgggacatattctgctgcatgattttctgctagtgcctagagagctgtctggatcttctcctgtgctggaggagacacatcctgctcatcagcagggagcttctagacctggacctagagatgctcaggctcatcctggaagacctagagctgtgcctacacagtgtgatgtgcctcctaattctagatttgattgtgctcctgataaggctataacacaggagcagtgtgaggctagaggatgttgttatattcctgctaagcagggactgcagggagctcagatgggacagccttggtgtttttttcctccttcttatccttcttataagctggagaatctgtcttcttctgagatgggatatacagctacactgacaagaacaacacctacattttttcctaaggatattctgacactgagactggatgtgatgatggagacagagaatagactgcattttacaattaaggatcctgctaatagaagatatgaggtgcctctagagacacctagagtgcattctagagctccttctcctctgtattctgtggagttttctgaggagccttttggagtgattgtgcatagacagctggatggaagagtgctgctgaatacaacagtggctcctctgttttttgctgatcagtttctgcagctgtctacatctctgccttctcagtatattacaggactggctgagcatctgtctcctctgatgctgtctacatcttggacaagaattacactgtggaatagagatctggctcctacacctggagctaatctgtatggatctcatcctttttatctggctctggaggatggaggatctgctcatggagtgtttctgctgaattctaatgctatggatgtagtgctgcagccttctcctgctctgtcttggagatctacaggaggaattctggatgtgtatatttttctaggacctgagcctaagtctgtggtgcagcagtatctggatgtagtgggatatccttttatgcctccttattggggactgggatttcatctgtgtagatggggatattcttctacagctattacaagacaggtggttgagaatatgacaagagctcattttcctctggatgtgcagtggaatgatctagattatatggattctagaagagattttacatttaataaggatggatttagagattttcctgctatggtgcaggagctgcatcagggaggaagaagatatatgatgattgtggatcctgctatttcttcttctggacctgctggatcttatagaccttatgatgagggactgagaagaggagtgtttattacaaatgagacaggacagcctctgattggaaaggtgtggcctggatctacagcttttcctgattttacaaatcctacagctctggcttggtgggaggatatggtggctgagtttcatgatcaggtgccttttgatggaatgtggattgatatgaatgagccttctaattttataagaggatctgaggatggatgtcctaataatgagctagagaatcctccttatgtgcctggagtagtgggaggaacactgcaggctgctacaatttgtgcttcttctcatcagtttctgtctacacattataatctgcataatctgtatggactgacagaggctattgcttctcatagagctctggtgaaggctagaggaacaagaccttttgtgatttctagatctacatttgctggacatggaagatatgctggacattggacaggagatgtatggtcttcttgggagcagctagcttcttctgtgcctgagattctgcagtttaatctgctaggagtgcctctggtgggagctgatgtgtgtggatttctgggaaatacatctgaggagctgtgtgtgagatggacacagctgggagctttttatccttttatgagaaatcataattctctgctgtctctgcctcaggagccttattctttttctgagcctgctcagcaggctatgagaaaggctctgacactgagatatgctctgctgcctcatctgtatacactgtttcatcaggctcatgtggctggagagacagtagctagacctctgtttctggagtttcctaaggattcttctacatggacagttgatcatcagctgctgtggggagaggctctgctgattacacctgtgctgcaggctggaaaggctgaggtgacaggatattttcctctgggaacatggtatgatctgcagacagtgcctatagaggctctgggatctctgcctcctcctcctgctgctcctagagagcctgctattcattctgagggacagtgggtgacactgcctgctcctctggatacaattaatgtgcatctgagagctggatatattattcctctgcagggacctggactgacaacaacagagtctagacagcagcctatggctctggctgtggctctgacaaagggaggagaggctagaggagagctgttttgggatgatggagagtctctggaggtgctggagagaggagcttatacacaggtgatttttctggctagaaataatacaattgtgaatgagctggtgagagtgacatctgagggagctggactgcagctgcagaaggtgacagtgctgggagtggctacagctcctcagcaggtgctgtctaatggagtgcctgtgtctaattttacatattctcctgatacaaaggtgctggatatttgtgtgtctctgctgatgggagagcagtttctggtgtcttggtgttaatgatttaaatctcgagccgggcggagtgtgttagtctctccagagggaggctggttccccagggaagcagagcctgtgtgcgggcagcagctgtgtgcgggcctgggggttgttaagtgcaattatttttaataaaaggggcatttggaaaaaaaaaaaaaaggtagcagtcgacagatgaattctgcagatctgtggcttctagctgcccgggtggcatccctgtgacccctccccagtgcctctcctggccctggaagttgccactccagtgcccaccagccttgtcctaataaaattaagttgcatcattttgtctgactaggtgtccttctataatattatggggtggaggggggtggtatggagcaaggggcaagttgggaagacaacctgtagggcctgcggggtctattgggaaccaagctggagtgcagtggcacaatcttggctcactgcaatctccgcctcctgggttcaagcgattctcctgcctcagcctcccgagttgttgggattccaggcatgcatgaccaggctcagctaatttttgtttttttggtagagacggggtttcaccatattggccaggctggtctccaactcctaatctcaggtgatctacccaccttggcctcccaaattgctgggattacaggcgtgaaccactgctcccttccctgtccttctgattttaaaaaaaagagaaatgttctggcacctgcacttgcactggggacagcctattttgctagtttgttttgtttcgttttgttttgatggagagcgtatgtt

SEQ ID NO: 27 - DNA, 8077 bp, synthetic construct
  source 1..8077: mol_type = other DNA
tctagagctagcatatggatccatcgatttagggataacagggtaattatcagcacacaattgcccattatacgcgcgtataatggactattgtgtgctgatatctgtacacttaagggctagatcttagcttacgtcactagagggtccacgtttagtttttaagatccattgatctcctaaacgctgcaagattcgcaacctggtatacttagcctaggcgctaggtcctagtgcagcgggactttttttctaaagtcgttgagaggaggagtcgtcagaccagatagctttgatgtcctgatcggaaggatcgttggcccccctgcaggcagctgttaattaactgcgcgctcgctcgctcactgaggccgcccgggcaaagcccgggcgtcgggcgacctttggtcgcccggcctcagtgagcgagcgagcgcgcagagagggagtggccaactccatcactaggggttccttgtagttaatgattaacccgccatgctacttatctacggcgcgccacgcgttctaggagttaatttttaaaaagcagtcaaaagtccaagtgcccttgcgagcatttactctctctgtttgctctggttaataatctcaggagcacaaacattccttactagttctaggagttaatttttaaaaagcagtcaaaagtccaagtgcccttgcgagcatttactctctctgtttgctctggttaataatctcaggagcacaaacattccttactagttctagagcggccgccagtgtgctggaattcggcttttttagggctggaagctacctttgacatcatttcctctgcgaatgcatgtataatttctacagaacctattagaaaggatcacccagcctctgcttttgtacaactttcccttaaaaaactgccaatcccactgctgtttggcccaatagtgagaactttttcctgctgcctcttggtgcttttgcctatggcccctattctgcctgctgaagacactcttgccagcatggacttaaacccctccagctctgacaatcctctttctcttttgttttacatgaagggtctggcagccaaagcaatcactcaaagttcaaaccttatcattttttgctttgttcctcttggccttggttttgtacatcagctttgaaaataccatcccagggttaatgctggggttaatttataactgagagtgctctagttctgcaatacaggacatgctataaaaatggaaagatgttgctttctgagagatcaggtggattcttgggcatttgcttaagcttggtaccgccaccatgggggtgaggcaccctccctgttctcacaggctgctggctgtgtgtgctctggtgtctctggccactgctgccctgctgggccatatcctgctgcatgacttcctgctggtgcctagggagctgtctggcagcagccctgtgctggaagagacccaccctgctcaccagcagggggccagcaggccaggccccagggatgcccaggcccaccctggcagacccagggctgtgcccacccagtgtgatgtgcctcccaacagcagatttgactgtgcccctgataaggccattactcaggaacagtgtgaggccaggggctgctgctatatccctgccaagcagggcctgcagggggcccagatggggcagccctggtgcttcttcccccccagctacccctcttataagctggagaatctgagcagctctgaaatgggctacactgccactctgaccaggactacccccaccttcttccccaaggatattctgactctgaggctggatgtgatgatggagactgagaacaggctgcacttcaccatcaaggaccctgccaacaggaggtatgaggtgcccctggaaactcccagggtgcactctagggcccccagccccctgtattctgtggagttctctgaggagccttttggggtcattgtccacaggcagctggatggcagggtgctgctgaatactactgtggcccctctgttctttgctgaccagttcctgcagctgagcaccagcctgccttctcagtacattactggcctggctgagcatctgagccccctgatgctgagcacctcttggaccagaatcaccctgtggaacagggacctggctcccactcctggggccaacctgtatggcagccaccccttctacctggccctggaggatgggggctctgcccatggggtgttcctgctgaacagcaatgccatggatgtggtgctgcagccctctcctgccctgtcttggagatctactgggggcatcctggatgtgtatatcttcctggggcctgagcccaagtctgtggtgcagcagtacctggatgtggtgggctaccccttcatgcccccctactggggcctgggcttccacctgtgcaggtggggctactcttctactgctatcaccaggcaggtggtggagaacatgaccagggctcacttccctctggatgtgcagtggaatgacctggactacatggactctaggagagacttcacttttaataaggatgggttcagggactttcctgccatggtgcaggagctgcatcaggggggcaggagatatatgatgattgtggaccctgctatttctagctctggccctgctggcagctataggccctatgatgaggggctgaggaggggggtgttcatcactaatgagactggccagcccctgattggcaaggtgtggcctggctctactgccttccctgatttcaccaaccccactgccctggcctggtgggaggatatggtggctgagtttcatgaccaggtgccctttgatggcatgtggattgacatgaatgagcccagcaactttatcaggggctctgaagatggctgccccaacaatgagctggagaaccccccctatgtgcctggggtggtggggggcaccctgcaggctgccaccatctgtgccagcagccaccagttcctgagcacccactataacctgcacaacctgtatggcctgactgaggccattgcctctcacagggccctggtgaaggctagggggactaggccctttgtgatcagcaggtctacttttgctggccatggcaggtatgctgggcactggactggggatgtgtggtctagctgggagcagctggccagctctgtgcctgagatcctgcagtttaatctgctgggggtgcccctggtgggggctgatgtgtgtggcttcctgggcaatacctctgaggagctgtgtgtgaggtggactcagctgggggctttctaccccttcatgagaaaccacaactctctgctgagcctgccccaggagccctattctttttctgagcctgcccagcaggctatgaggaaggccctgactctgaggtatgccctgctgccccacctgtataccctgttccatcaggcccatgtggctggggagactgtggccagacctctgttcctggagttccccaaggatagctctacttggactgtggaccaccagctgctgtggggggaggctctgctgatcacccctgtgctgcaggctgggaaggctgaggtgactggctatttccccctgggcacctggtatgatctgcagactgtgcccattgaggccctgggctctctgccccctccccctgctgcccccagggagcctgccatccactctgagggccagtgggtgaccctgcctgcccctctggacactatcaatgtgcacctgagggctggctacatcatccccctgcagggccctggcctgactaccactgagtctaggcagcagcccatggccctggctgtggctctgaccaaggggggggaggccaggggggagctgttctgggatgatggggagtctctggaggtgctggagaggggggcctacacccaggtgatcttcctggctaggaataacaccattgtcaatgagctggtgagggtgacctctgagggggctggcctgcagctgcagaaggtgactgtgctgggggtggctactgccccccagcaggtgctgagcaatggggtgcctgtgagcaacttcacctatagccctgacaccaaggtgctggacatctgtgtgagcctgctgatgggggagcagttcctggtgagctggtgctaatttaaatctcgagccgggcggagtgtgttagtctctccagagggaggctggttccccagggaagcagagcctgtgtgcgggcagcagctgtgtgcgggcctgggggttgttaagtgcaattatttttaataaaaggggcatttggaaaaaaaaaaaaaaggtagcagtcgacagatgaattctgcagatctgtggcttctagctgcccgggtggcatccctgtgacccctccccagtgcctctcctggccctggaagttgccactccagtgcccaccagccttgtcctaataaaattaagttgcatcattttgtctgactaggtgtccttctataatattatggggtggaggggggtggtatggagcaaggggcaagttgggaagacaacctgtagggcctgcggggtctattgggaaccaagctggagtgcagtggcacaatcttggctcactgcaatctccgcctcctgggttcaagcgattctcctgcctcagcctcccgagttgttgggattccaggcatgcatgaccaggctcagctaatttttgtttttttggtagagacggggtttcaccatattggccaggctggtctccaactcctaatctcaggtgatctacccaccttggcctcccaaattgctgggattacaggcgtgaaccactgctcccttccctgtccttctgattttaaaaaaaagagaaatgttctggcacctgcacttgcactggggacagcctattttgctagtttgttttgtttcgttttgttttgatggagagcgtatgttgtttaaacgcggccgcgtagataagtagcatggcgggttaatcattaactacaaggaacccctagtgatggagttggccactccctctctgcgcgctcgctcgctcactgaggccgggcgaccaaaggtcgcccgacgcccgggctttgcccgggcggcctcagtgagcgagcgagcgcgcagttaattaaggcgccctaggccgacccttagactctgtactcagttctataaacgagccattggatacgagatccgtagattgataagggacacggaatatccccggacgcaatagacaccggtggacagcttggtatcctgagcacagtcgcgcgtccgaatctagctctactttagaggccccggattctgatggtcgtagaccgcagaaccgattggggggatgagatctactagttatcagcacacaattgcccattatacgcgcgtataatggactattgtgtgctgatatagggataacagggtaattctagagctagcatatggatccatcgatttgatgcggtattttctccttacgcatctgtgcggtatttcacaccgcatacgtcaaagcaaccatagtacgcgccctgtagcggcgcattaagcgcggcgggtgtggtggttacgcgcagcgtgaccgctacacttgccagcgccctagcgcccgctcctttcgctttcttcccttcctttctcgccacgttcgccggctttccccgtcaagctctaaatcgggggctccctttagggttccgatttagtgctttacggcacctcgaccccaaaaaacttgatttgggtgatggttcacgtagtgggccatcgccctgatagacggtttttcgccctttgacgttggagtccacgttctttaatagtggactcttgttccaaactggaacaacactcaactctatctcgggctattcttttgatttataagggattttgccgatttcggtctattggttaaaaaatgagctgatttaacaaaaatttaacgcgaattttaacaaaatattaacgtttacaattttatggtgcactctcagtacaatctgctctgatgccgcatagttaagccagccccgacacccgccaacacccgctgacgcgccctgacgggcttgtctgctcccggcatccgcttacagacaagctgtgaccgtctccgggagctgcatgtgtcagaggttttcaccgtcatcaccgaaacgcgcgagacgaaagggcctcgtgatacgcctatttttataggttaatgtcatgataataatggtttcttagacgtcaggtggcacttttcggggaaatgtgcgcggaacccctatttgtttatttttctaaatacattcaaatatgtatccgctcatgagacaataaccctgataaatgcttcaataatattgaaaaaggaagagtatgagccatattcaacgggaaacgtcgaggccgcgattaaattccaacatggatgctgatttatatgggtataaatgggctcgcgataatgtcgggcaatcaggtgcgacaatctatcgcttgtatgggaagcccgatgcgccagagttgtttctgaaacatggcaaaggtagcgttgccaatgatgttacagatgagatggtcagactaaactggctgacggaatttatgcctcttccgaccatcaagcattttatccgtactcctgatgatgcatggttactcaccactgcgatccccggaaaaacagcattccaggtattagaagaatatcctgattcaggtgaaaatattgttgatgcgctggcagtgttcctgcgccggttgcattcgattcctgtttgtaattgtccttttaacagcgatcgcgtatttcgtctcgctcaggcgcaatcacgaatgaataacggtttggttgatgcgagtgattttgatgacgagcgtaatggctggcctgttgaacaagtctggaaagaaatgcataaacttttgccattctcaccggattcagtcgtcactcatggtgatttctcacttgataaccttatttttgacgaggggaaattaataggttgtattgatgttggacgagtcggaatcgcagaccgataccaggatcttgccatcctatggaactgcctcggtgagttttctccttcattacagaaacggctttttcaaaaatatggtattgataatcctgatatgaataaattgcagtttcatttgatgctcgatgagtttttctaagcgtataatggtctagagctagcatatggatccatcgattccattatacgcctgtcagaccaagtttactcatatatactttagattgatttaaaacttcatttttaatttaaaaggatctaggtgaagatcctttttgataatctcatgaccaaaatcccttaacgtgagttttcgttccactgagcgtcagaccccgtagaaaagatcaaaggatcttcttgagatcctttttttctgcgcgtaatctgctgcttgcaaacaaaaaaaccaccgctaccagcggtggtttgtttgccggatcaagagctaccaactctttttccgaaggtaactggcttcagcagagcgcagataccaaatactgttcttctagtgtagccgtagttaggccaccacttcaagaactctgtagcaccgcctacatacctcgctctgctaatcctgttaccagtggctgctgccagtggcgataagtcgtgtcttaccgggttggactcaagacgatagttaccggataaggcgcagcggtcgggctgaacggggggttcgtgcacacagcccagcttggagcgaacgacctacaccgaactgagatacctacagcgtgagctatgagaaagcgccacgcttcccgaagggagaaaggcggacaggtatccggtaagcggcagggtcggaacaggagagcgcacgagggagcttccagggggaaacgcctggtatctttatagtcctgtcgggtttcgccacctctgacttgagcgtcgatttttgtgatgctcgtcaggggggcggagcctatggaaaaacgccagcaacgcggcctttttacggttcctggccttttgctggccttttgctcacatgt

SEQ ID NO: 28 - DNA, 8080 bp, unidentified
  source 1..8080: mol_type = unassigned DNA
tctagagctagcatatggatccatcgatttagggataacagggtaattatcagcacacaattgcccattatacgcgcgtataatggactattgtgtgctgatatctgtacacttaagggctagatcttagcttacgtcactagagggtccacgtttagtttttaagatccattgatctcctaaacgctgcaagattcgcaacctggtatacttagcctaggcgctaggtcctagtgcagcgggactttttttctaaagtcgttgagaggaggagtcgtcagaccagatagctttgatgtcctgatcggaaggatcgttggcccccctgcaggcagctgttaattaactgcgcgctcgctcgctcactgaggccgcccgggcaaagcccgggcgtcgggcgacctttggtcgcccggcctcagtgagcgagcgagcgcgcagagagggagtggccaactccatcactaggggttccttgtagttaatgattaacccgccatgctacttatctacggcgcgccacgcgttctaggagttaatttttaaaaagcagtcaaaagtccaagtgcccttgcgagcatttactctctctgtttgctctggttaataatctcaggagcacaaacattccttactagttctaggagttaatttttaaaaagcagtcaaaagtccaagtgcccttgcgagcatttactctctctgtttgctctggttaataatctcaggagcacaaacattccttactagttctagagcggccgccagtgtgctggaattcggcttttttagggctggaagctacctttgacatcatttcctctgcgaatgcatgtataatttctacagaacctattagaaaggatcacccagcctctgcttttgtacaactttcccttaaaaaactgccaatcccactgctgtttggcccaatagtgagaactttttcctgctgcctcttggtgcttttgcctatggcccctattctgcctgctgaagacactcttgccagcatggacttaaacccctccagctctgacaatcctctttctcttttgttttacatgaagggtctggcagccaaagcaatcactcaaagttcaaaccttatcattttttgctttgttcctcttggccttggttttgtacatcagctttgaaaataccatcccagggttaatgctggggttaatttataactgagagtgctctagttctgcaatacaggacatgctataaaaatggaaagatgttgctttctgagagatcaggtggattcttgggcatttgcttaagcttggtaccgccaccatgggagtgagacatcctccttgttctcatagactgctggctgtgtgtgctctggtgtctctggctacagctgctctgctgggacatattctgctgcatgattttctgctagtgcctagagagctgtctggatcttctcctgtgctggaggagacacatcctgctcatcagcagggagcttctagacctggacctagagatgctcaggctcatcctggaagacctagagctgtgcctacacagtgtgatgtgcctcctaattctagatttgattgtgctcctgataaggctataacacaggagcagtgtgaggctagaggatgttgttatattcctgctaagcagggactgcagggagctcagatgggacagccttggtgtttttttcctccttcttatccttcttataagctggagaatctgtcttcttctgagatgggatatacagctacactgacaagaacaacacctacattttttcctaaggatattctgacactgagactggatgtgatgatggagacagagaatagactgcattttacaattaaggatcctgctaatagaagatatgaggtgcctctagagacacctagagtgcattctagagctccttctcctctgtattctgtggagttttctgaggagccttttggagtgattgtgcatagacagctggatggaagagtgctgctgaatacaacagtggctcctctgttttttgctgatcagtttctgcagctgtctacatctctgccttctcagtatattacaggactggctgagcatctgtctcctctgatgctgtctacatcttggacaagaattacactgtggaatagagatctggctcctacacctggagctaatctgtatggatctcatcctttttatctggctctggaggatggaggatctgctcatggagtgtttctgctgaattctaatgctatggatgtagtgctgcagccttctcctgctctgtcttggagatctacaggaggaattctggatgtgtatatttttctaggacctgagcctaagtctgtggtgcagcagtatctggatgtagtgggatatccttttatgcctccttattggggactgggatttcatctgtgtagatggggatattcttctacagctattacaagacaggtggttgagaatatgacaagagctcattttcctctggatgtgcagtggaatgatctagattatatggattctagaagagattttacatttaataaggatggatttagagattttcctgctatggtgcaggagctgcatcagggaggaagaagatatatgatgattgtggatcctgctatttcttcttctggacctgctggatcttatagaccttatgatgagggactgagaagaggagtgtttattacaaatgagacaggacagcctctgattggaaaggtgtggcctggatctacagcttttcctgattttacaaatcctacagctctggcttggtgggaggatatggtggctgagtttcatgatcaggtgccttttgatggaatgtggattgatatgaatgagccttctaattttataagaggatctgaggatggatgtcctaataatgagctagagaatcctccttatgtgcctggagtagtgggaggaacactgcaggctgctacaatttgtgcttcttctcatcagtttctgtctacacattataatctgcataatctgtatggactgacagaggctattgcttctcatagagctctggtgaaggctagaggaacaagaccttttgtgatttctagatctacatttgctggacatggaagatatgctggacattggacaggagatgtatggtcttcttgggagcagctagcttcttctgtgcctgagattctgcagtttaatctgctaggagtgcctctggtgggagctgatgtgtgtggatttctgggaaatacatctgaggagctgtgtgtgagatggacacagctgggagctttttatccttttatgagaaatcataattctctgctgtctctgcctcaggagccttattctttttctgagcctgctcagcaggctatgagaaaggctctgacactgagatatgctctgctgcctcatctgtatacactgtttcatcaggctcatgtggctggagagacagtagctagacctctgtttctggagtttcctaaggattcttctacatggacagttgatcatcagctgctgtggggagaggctctgctgattacacctgtgctgcaggctggaaaggctgaggtgacaggatattttcctctgggaacatggtatgatctgcagacagtgcctatagaggctctgggatctctgcctcctcctcctgctgctcctagagagcctgctattcattctgagggacagtgggtgacactgcctgctcctctggatacaattaatgtgcatctgagagctggatatattattcctctgcagggacctggactgacaacaacagagtctagacagcagcctatggctctggctgtggctctgacaaagggaggagaggctagaggagagctgttttgggatgatggagagtctctggaggtgctggagagaggagcttatacacaggtgatttttctggctagaaataatacaattgtgaatgagctggtgagagtgacatctgagggagctggactgcagctgcagaaggtgacagtgctgggagtggctacagctcctcagcaggtgctgtctaatggagtgcctgtgtctaattttacatattctcctgatacaaaggtgctggatatttgtgtgtctctgctgatgggagagcagtttctggtgtcttggtgttaatgatttaaatctcgagccgggcggagtgtgttagtctctccagagggaggctggttccccagggaagcagagcctgtgtgcgggcagcagctgtgtgcgggcctgggggttgttaagtgcaattatttttaataaaaggggcatttggaaaaaaaaaaaaaaggtagcagtcgacagatgaattctgcagatctgtggcttctagctgcccgggtggcatccctgtgacccctccccagtgcctctcctggccctggaagttgccactccagtgcccaccagccttgtcctaataaaattaagttgcatcattttgtctgactaggtgtccttctataatattatggggtggaggggggtggtatggagcaaggggcaagttgggaagacaacctgtagggcctgcggggtctattgggaaccaagctggagtgcagtggcacaatcttggctcactgcaatctccgcctcctgggttcaagcgattctcctgcctcagcctcccgagttgttgggattccaggcatgcatgaccaggctcagctaatttttgtttttttggtagagacggggtttcaccatattggccaggctggtctccaactcctaatctcaggtgatctacccaccttggcctcccaaattgctgggattacaggcgtgaaccactgctcccttccctgtccttctgattttaaaaaaaagagaaatgttctggcacctgcacttgcactggggacagcctattttgctagtttgttttgtttcgttttgttttgatggagagcgtatgttgtttaaacgcggccgcgtagataagtagcatggcgggttaatcattaactacaaggaacccctagtgatggagttggccactccctctctgcgcgctcgctcgctcactgaggccgggcgaccaaaggtcgcccgacgcccgggctttgcccgggcggcctcagtgagcgagcgagcgcgcagttaattaaggcgccctaggccgacccttagactctgtactcagttctataaacgagccattggatacgagatccgtagattgataagggacacggaatatccccggacgcaatagacaccggtggacagcttggtatcctgagcacagtcgcgcgtccgaatctagctctactttagaggccccggattctgatggtcgtagaccgcagaaccgattggggggatgagatctactagttatcagcacacaattgcccattatacgcgcgtataatggactattgtgtgctgatatagggataacagggtaattctagagctagcatatggatccatcgatttgatgcggtattttctccttacgcatctgtgcggtatttcacaccgcatacgtcaaagcaaccatagtacgcgccctgtagcggcgcattaagcgcggcgggtgtggtggttacgcgcagcgtgaccgctacacttgccagcgccctagcgcccgctcctttcgctttcttcccttcctttctcgccacgttcgccggctttccccgtcaagctctaaatcgggggctccctttagggttccgatttagtgctttacggcacctcgaccccaaaaaacttgatttgggtgatggttcacgtagtgggccatcgccctgatagacggtttttcgccctttgacgttggagtccacgttctttaatagtggactcttgttccaaactggaacaacactcaactctatctcgggctattcttttgatttataagggattttgccgatttcggtctattggttaaaaaatgagctgatttaacaaaaatttaacgcgaattttaacaaaatattaacgtttacaattttatggtgcactctcagtacaatctgctctgatgccgcatagttaagccagccccgacacccgccaacacccgctgacgcgccctgacgggcttgtctgctcccggcatccgcttacagacaagctgtgaccgtctccgggagctgcatgtgtcagaggttttcaccgtcatcaccgaaacgcgcgagacgaaagggcctcgtgatacgcctatttttataggttaatgtcatgataataatggtttcttagacgtcaggtggcacttttcggggaaatgtgcgcggaacccctatttgtttatttttctaaatacattcaaatatgtatccgctcatgagacaataaccctgataaatgcttcaataatattgaaaaaggaagagtatgagccatattcaacgggaaacgtcgaggccgcgattaaattccaacatggatgctgatttatatgggtataaatgggctcgcgataatgtcgggcaatcaggtgcgacaatctatcgcttgtatgggaagcccgatgcgccagagttgtttctgaaacatggcaaaggtagcgttgccaatgatgttacagatgagatggtcagactaaactggctgacggaatttatgcctcttccgaccatcaagcattttatccgtactcctgatgatgcatggttactcaccactgcgatccccggaaaaacagcattccaggtattagaagaatatcctgattcaggtgaaaatattgttgatgcgctggcagtgttcctgcgccggttgcattcgattcctgtttgtaattgtccttttaacagcgatcgcgtatttcgtctcgctcaggcgcaatcacgaatgaataacggtttggttgatgcgagtgattttgatgacgagcgtaatggctggcctgttgaacaagtctggaaagaaatgcataaacttttgccattctcaccggattcagtcgtcactcatggtgatttctcacttgataaccttatttttgacgaggggaaattaataggttgtattgatgttggacgagtcggaatcgcagaccgataccaggatcttgccatcctatggaactgcctcggtgagttttctccttcattacagaaacggctttttcaaaaatatggtattgataatcctgatatgaataaattgcagtttcatttgatgctcgatgagtttttctaagcgtataatggtctagagctagcatatggatccatcgattccattatacgcctgtcagaccaagtttactcatatatactttagattgatttaaaacttcatttttaatttaaaaggatctaggtgaagatcctttttgataatctcatgaccaaaatcccttaacgtgagttttcgttccactgagcgtcagaccccgtagaaaagatcaaaggatcttcttgagatcctttttttctgcgcgtaatctgctgcttgcaaacaaaaaaaccaccgctaccagcggtggtttgtttgccggatcaagagctaccaactctttttccgaaggtaactggcttcagcagagcgcagataccaaatactgttcttctagtgtagccgtagttaggccaccacttcaagaactctgtagcaccgcctacatacctcgctctgctaatcctgttaccagtggctgctgccagtggcgataagtcgtgtcttaccgggttggactcaagacgatagttaccggataaggcgcagcggtcgggctgaacggggggttcgtgcacacagcccagcttggagcgaacgacctacaccgaactgagatacctacagcgtgagctatgagaaagcgccacgcttcccgaagggagaaaggcggacaggtatccggtaagcggcagggtcggaacaggagagcgcacgagggagcttccagggggaaacgcctggtatctttatagtcctgtcgggtttcgccacctctgacttgagcgtcgatttttgtgatgctcgtcaggggggcggagcctatggaaaaacgccagcaacgcggcctttttacggttcctggccttttgctggccttttgctcacatgt

SEQ ID NO: 29 - DNA, 8077 bp, synthetic construct
  source 1..8077: mol_type = other DNA
tctagagctagcatatggatccatcgatttagggataacagggtaattatcagcacacaattgcccattatacgcgcgtataatggactattgtgtgctgatatctgtacacttaagggctagatcttagcttacgtcactagagggtccacgtttagtttttaagatccattgatctcctaaacgctgcaagattcgcaacctggtatacttagcctaggcgctaggtcctagtgcagcgggactttttttctaaagtcgttgagaggaggagtcgtcagaccagatagctttgatgtcctgatcggaaggatcgttggcccccctgcaggcagctgttaattaactgcgcgctcgctcgctcactgaggccgcccgggcaaagcccgggcgtcgggcgacctttggtcgcccggcctcagtgagcgagcgagcgcgcagagagggagtggccaactccatcactaggggttccttgtagttaatgattaacccgccatgctacttatctacggcgcgccacgcgttctaggagttaatttttaaaaagcagtcaaaagtccaagtgcccttgcgagcatttactctctctgtttgctctggttaataatctcaggagcacaaacattccttactagttctaggagttaatttttaaaaagcagtcaaaagtccaagtgcccttgcgagcatttactctctctgtttgctctggttaataatctcaggagcacaaacattccttactagttctagagcggccgccagtgtgctggaattcggcttttttagggctggaagctacctttgacatcatttcctctgcgaatgcatgtataatttctacagaacctattagaaaggatcacccagcctctgcttttgtacaactttcccttaaaaaactgccaatcccactgctgtttggcccaatagtgagaactttttcctgctgcctcttggtgcttttgcctatggcccctattctgcctgctgaagacactcttgccagcatggacttaaacccctccagctctgacaatcctctttctcttttgttttacatgaagggtctggcagccaaagcaatcactcaaagttcaaaccttatcattttttgctttgttcctcttggccttggttttgtacatcagctttgaaaataccatcccagggttaatgctggggttaatttataactgagagtgctctagttctgcaatacaggacatgctataaaaatggaaagatgttgctttctgagagatcaggtggattcttgggcatttgcttaagcttggtaccgccaccatgggggtgaggcatcctccctgcagccataggctgctggctgtgtgtgccctggtgagcctggctactgctgctctgctggggcacatcctgctgcatgatttcctgctggtgcctagggagctgtctggcagcagccctgtcctggaggagacccaccctgcccatcagcagggggcctctagacctggccccagggatgcccaggcccatcctgggaggcccagggctgtgcccacccagtgtgatgtgcctcccaacagcaggtttgactgtgctcctgacaaagccatcacccaggagcagtgtgaagccaggggctgttgttacattcctgccaagcagggcctgcagggggcccagatgggccagccctggtgcttcttcccccctagctaccccagctacaagctggagaatctgagcagctctgaaatgggctacactgccaccctgactaggaccacccccaccttcttccctaaggatatcctgaccctgaggctggatgtgatgatggagactgagaacaggctgcacttcaccatcaaggatcctgccaacaggaggtatgaggtgcccctggagacccccagggtgcacagcagggctccctctcccctgtattctgtggaattctctgaggagccctttggggtgattgtgcacaggcagctggatggcagagtgctgctgaacactactgtggctcccctgttctttgctgatcagttcctgcagctgagcacttctctgcccagccagtacatcactgggctggctgagcacctgagccctctgatgctgagcaccagctggaccaggatcaccctgtggaacagggacctggctcccacccctggggccaatctgtatggcagccaccccttctacctggctctggaggatgggggctctgcccatggggtgttcctgctgaactctaatgccatggatgtggtgctgcagcccagccctgccctgagctggaggagcactgggggcatcctggatgtgtacatcttcctgggccctgagcccaagtctgtggtccagcagtatctggatgtggtggggtaccctttcatgcccccctactggggcctgggcttccacctgtgcaggtgggggtacagcagcactgccatcaccaggcaggtggtggagaatatgaccagggcccacttccccctggatgtgcagtggaatgatctggactacatggattctaggagggacttcaccttcaacaaggatggcttcagggactttcctgccatggtgcaggagctgcaccaggggggcaggaggtacatgatgattgtggacccagccatctctagctctgggccagctggcagctacaggccctatgatgagggcctgaggaggggggtgttcatcactaatgagactggccagcccctgattggcaaggtgtggcctgggagcactgccttccctgacttcaccaaccccactgccctggcctggtgggaggatatggtggctgagttccatgaccaggtgccctttgatgggatgtggattgacatgaatgagccctctaactttattaggggctctgaggatgggtgccctaacaatgagctggagaaccccccttatgtgcctggggtggtggggggcaccctgcaggctgccaccatctgtgccagcagccaccagttcctgtctacccactacaacctgcacaatctgtatgggctgactgaggctattgccagccacagggccctggtgaaggctagggggaccaggccttttgtgatcagcaggagcacctttgctgggcatggcagatatgctggccattggactggggatgtgtggtctagctgggagcagctggccagctctgtgcctgagatcctgcagttcaatctgctgggggtgcccctggtgggggctgatgtgtgtgggttcctgggcaatacctctgaggagctgtgtgtgaggtggacccagctgggggccttctaccccttcatgaggaaccacaacagcctgctgagcctgcctcaggagccctattctttttctgagcctgcccagcaggctatgaggaaggccctgactctgaggtatgccctgctgcctcacctgtacaccctgttccaccaggcccatgtggctggggagactgtggccaggcccctgttcctggagttccccaaggatagctctacctggactgtggaccatcagctgctgtggggggaggccctgctgatcacccctgtgctgcaggctggcaaggctgaggtgactggctactttcctctgggcacctggtatgatctgcagactgtgcccattgaagccctgggcagcctgcctcctccccctgctgcccctagggagcctgccatccactctgagggccagtgggtgaccctgccagcccctctggacaccatcaatgtgcatctgagggctggctacatcattcccctgcagggccctgggctgaccaccactgagagcaggcagcagcccatggctctggctgtggccctgaccaaggggggggaggccaggggggagctgttctgggatgatggggagagcctggaggtgctggagaggggggcctacacccaggtgatcttcctggccaggaataataccattgtgaatgagctggtgagggtgacttctgagggggctggcctgcagctgcagaaggtgactgtgctgggggtggctactgctcctcagcaggtgctgtctaatggggtgcctgtgagcaacttcacttacagccctgacactaaggtgctggacatttgtgtgagcctgctgatgggggagcagttcctggtgtcttggtgctgatttaaatctcgagccgggcggagtgtgttagtctctccagagggaggctggttccccagggaagcagagcctgtgtgcgggcagcagctgtgtgcgggcctgggggttgttaagtgcaattatttttaataaaaggggcatttggaaaaaaaaaaaaaaggtagcagtcgacagatgaattctgcagatctgtggcttctagctgcccgggtggcatccctgtgacccctccccagtgcctctcctggccctggaagttgccactccagtgcccaccagccttgtcctaataaaattaagttgcatcattttgtctgactaggtgtccttctataatattatggggtggaggggggtggtatggagcaaggggcaagttgggaagacaacctgtagggcctgcggggtctattgggaaccaagctggagtgcagtggcacaatcttggctcactgcaatctccgcctcctgggttcaagcgattctcctgcctcagcctcccgagttgttgggattccaggcatgcatgaccaggctcagctaatttttgtttttttggtagagacggggtttcaccatattggccaggctggtctccaactcctaatctcaggtgatctacccaccttggcctcccaaattgctgggattacaggcgtgaaccactgctcccttccctgtccttctgattttaaaaaaaagagaaatgttctggcacctgcacttgcactggggacagcctattttgctagtttgttttgtttcgttttgttttgatggagagcgtatgttgtttaaacgcggccgcgtagataagtagcatggcgggttaatcattaactacaaggaacccctagtgatggagttggccactccctctctgcgcgctcgctcgctcactgaggccgggcgaccaaaggtcgcccgacgcccgggctttgcccgggcggcctcagtgagcgagcgagcgcgcagttaattaaggcgccctaggccgacccttagactctgtactcagttctataaacgagccattggatacgagatccgtagattgataagggacacggaatatccccggacgcaatagacaccggtggacagcttggtatcctgagcacagtcgcgcgtccgaatctagctctactttagaggccccggattctgatggtcgtagaccgcagaaccgattggggggatgagatctactagttatcagcacacaattgcccattatacgcgcgtataatggactattgtgtgctgatatagggataacagggtaattctagagctagcatatggatccatcgatttgatgcggtattttctccttacgcatctgtgcggtatttcacaccgcatacgtcaaagcaaccatagtacgcgccctgtagcggcgcattaagcgcggcgggtgtggtggttacgcgcagcgtgaccgctacacttgccagcgccctagcgcccgctcctttcgctttcttcccttcctttctcgccacgttcgccggctttccccgtcaagctctaaatcgggggctccctttagggttccgatttagtgctttacggcacctcgaccccaaaaaacttgatttgggtgatggttcacgtagtgggccatcgccctgatagacggtttttcgccctttgacgttggagtccacgttctttaatagtggactcttgttccaaactggaacaacactcaactctatctcgggctattcttttgatttataagggattttgccgatttcggtctattggttaaaaaatgagctgatttaacaaaaatttaacgcgaattttaacaaaatattaacgtttacaattttatggtgcactctcagtacaatctgctctgatgccgcatagttaagccagccccgacacccgccaacacccgctgacgcgccctgacgggcttgtctgctcccggcatccgcttacagacaagctgtgaccgtctccgggagctgcatgtgtcagaggttttcaccgtcatcaccgaaacgcgcgagacgaaagggcctcgtgatacgcctatttttataggttaatgtcatgataataatggtttcttagacgtcaggtggcacttttcggggaaatgtgcgcggaacccctatttgtttatttttctaaatacattcaaatatgtatccgctcatgagacaataaccctgataaatgcttcaataatattgaaaaaggaagagtatgagccatattcaacgggaaacgtcgaggccgcgattaaattccaacatggatgctgatttatatgggtataaatgggctcgcgataatgtcgggcaatcaggtgcgacaatctatcgcttgtatgggaagcccgatgcgccagagttgtttctgaaacatggcaaaggtagcgttgccaatgatgttacagatgagatggtcagactaaactggctgacggaatttatgcctcttccgaccatcaagcattttatccgtactcctgatgatgcatggttactcaccactgcgatccccggaaaaacagcattccaggtattagaagaatatcctgattcaggtgaaaatattgttgatgcgctggcagtgttcctgcgccggttgcattcgattcctgtttgtaattgtccttttaacagcgatcgcgtatttcgtctcgctcaggcgcaatcacgaatgaataacggtttggttgatgcgagtgattttgatgacgagcgtaatggctggcctgttgaacaagtctggaaagaaatgcataaacttttgccattctcaccggattcagtcgtcactcatggtgatttctcacttgataaccttatttttgacgaggggaaattaataggttgtattgatgttggacgagtcggaatcgcagaccgataccaggatcttgccatcctatggaactgcctcggtgagttttctccttcattacagaaacggctttttcaaaaatatggtattgataatcctgatatgaataaattgcagtttcatttgatgctcgatgagtttttctaagcgtataatggtctagagctagcatatggatccatcgattccattatacgcctgtcagaccaagtttactcatatatactttagattgatttaaaacttcatttttaatttaaaaggatctaggtgaagatcctttttgataatctcatgaccaaaatcccttaacgtgagttttcgttccactgagcgtcagaccccgtagaaaagatcaaaggatcttcttgagatcctttttttctgcgcgtaatctgctgcttgcaaacaaaaaaaccaccgctaccagcggtggtttgtttgccggatcaagagctaccaactctttttccgaaggtaactggcttcagcagagcgcagataccaaatactgttcttctagtgtagccgtagttaggccaccacttcaagaactctgtagcaccgcctacatacctcgctctgctaatcctgttaccagtggctgctgccagtggcgataagtcgtgtcttaccgggttggactcaagacgatagttaccggataaggcgcagcggtcgggctgaacggggggttcgtgcacacagcccagcttggagcgaacgacctacaccgaactgagatacctacagcgtgagctatgagaaagcgccacgcttcccgaagggagaaaggcggacaggtatccggtaagcggcagggtcggaacaggagagcgcacgagggagcttccagggggaaacgcctggtatctttatagtcctgtcgggtttcgccacctctgacttgagcgtcgatttttgtgatgctcgtcaggggggcggagcctatggaaaaacgccagcaacgcggcctttttacggttcctggccttttgctggccttttgctcacatgt

SEQ ID NO: 30 - DNA, 8077 bp, synthetic construct
  source 1..8077: mol_type = other DNA
tctagagctagcatatggatccatcgatttagggataacagggtaattatcagcacacaattgcccattatacgcgcgtataatggactattgtgtgctgatatctgtacacttaagggctagatcttagcttacgtcactagagggtccacgtttagtttttaagatccattgatctcctaaacgctgcaagattcgcaacctggtatacttagcctaggcgctaggtcctagtgcagcgggactttttttctaaagtcgttgagaggaggagtcgtcagaccagatagctttgatgtcctgatcggaaggatcgttggcccccctgcaggcagctgttaattaactgcgcgctcgctcgctcactgaggccgcccgggcaaagcccgggcgtcgggcgacctttggtcgcccggcctcagtgagcgagcgagcgcgcagagagggagtggccaactccatcactaggggttccttgtagttaatgattaacccgccatgctacttatctacggcgcgccacgcgttctaggagttaatttttaaaaagcagtcaaaagtccaagtgcccttgcgagcatttactctctctgtttgctctggttaataatctcaggagcacaaacattccttactagttctaggagttaatttttaaaaagcagtcaaaagtccaagtgcccttgcgagcatttactctctctgtttgctctggttaataatctcaggagcacaaacattccttactagttctagagcggccgccagtgtgctggaattcggcttttttagggctggaagctacctttgacatcatttcctctgcgaatgcatgtataatttctacagaacctattagaaaggatcacccagcctctgcttttgtacaactttcccttaaaaaactgccaatcccactgctgtttggcccaatagtgagaactttttcctgctgcctcttggtgcttttgcctatggcccctattctgcctgctgaagacactcttgccagcatggacttaaacccctccagctctgacaatcctctttctcttttgttttacatgaagggtctggcagccaaagcaatcactcaaagttcaaaccttatcattttttgctttgttcctcttggccttggttttgtacatcagctttgaaaataccatcccagggttaatgctggggttaatttataactgagagtgctctagttctgcaatacaggacatgctataaaaatggaaagatgttgctttctgagagatcaggtggattcttgggcatttgcttaagcttggtaccgccaccatgggggtgaggcaccccccctgctctcacaggctgctggctgtgtgtgccctggtgagcctggccactgctgctctgctggggcacatcctgctgcatgacttcctgctggtgcccagggagctgtctggcagctctcctgtgctggaggaaactcatcctgcccatcagcagggggcctctaggccaggccccagggatgcccaggcccatcctggcaggcccagagctgtgcccacccagtgtgatgtgccccccaacagcaggtttgattgtgcccctgataaggccatcacccaggagcagtgtgaggccaggggctgctgctacatccctgccaagcaggggctgcagggggcccagatgggccagccctggtgcttcttccccccttcttaccccagctacaagctggagaacctgtcttcttctgagatgggctatactgccaccctgaccaggaccactcccaccttcttccccaaggacatcctgactctgagactggatgtgatgatggagactgagaacaggctgcacttcaccatcaaggaccctgccaacaggaggtatgaggtgcctctggagactcctagagtgcacagcagggctccctctcccctgtactctgtggagttctctgaggagccctttggggtgattgtgcacagacagctggatgggagggtgctgctgaacaccactgtggcccccctgttctttgctgaccagttcctgcagctgtctacctctctgcccagccagtacattactgggctggctgaacatctgtctcccctgatgctgagcaccagctggaccaggatcactctgtggaacagggacctggcccccactcctggggccaatctgtatgggagccacccattctacctggccctggaggatgggggctctgcccatggggtgttcctgctgaacagcaatgccatggatgtggtgctgcagccttcccctgccctgagctggaggtctactgggggcatcctggatgtgtacattttcctgggccctgagcccaagtctgtggtgcagcagtacctggatgtggtggggtaccctttcatgcctccctactggggcctgggctttcacctgtgcaggtggggctattctagcactgccatcaccaggcaggtggtggagaacatgactagggctcatttccccctggatgtgcagtggaatgatctggattatatggactctaggagggactttactttcaataaggatggcttcagggattttcctgctatggtgcaggagctgcaccaggggggcaggaggtatatgatgattgtggatcctgccatctctagctctgggcctgctggctcttacaggccctatgatgaggggctgaggaggggggtgtttattactaatgagactggccagcctctgattgggaaggtgtggcctggcagcactgccttcccagacttcaccaaccccactgccctggcctggtgggaggacatggtggctgagttccatgaccaggtgccctttgatgggatgtggattgatatgaatgagccctctaacttcattaggggctctgaggatggctgccccaacaatgagctggagaaccccccatatgtgcctggggtggtgggggggaccctgcaggctgctaccatctgtgctagctctcaccagttcctgagcacccactacaacctgcacaatctgtatggcctgactgaggccattgccagccatagggccctggtgaaggccagggggaccagaccctttgtgatctccaggagcacctttgctggccatgggagatatgctggccattggactggggatgtgtggtctagctgggagcagctggccagctctgtgcctgagatcctgcagttcaatctgctgggggtgcctctggtgggggctgatgtgtgtggcttcctgggcaacacctctgaagaactgtgtgtgagatggacccagctgggggccttctaccccttcatgaggaaccacaacagcctgctgtctctgccccaggagccttactctttttctgagcctgcccagcaggccatgaggaaggccctgaccctgagatatgccctgctgcctcacctgtacaccctgttccaccaggcccatgtggctggggagactgtggccaggcccctgttcctggagttccccaaggacagcagcacctggactgtggaccaccagctgctgtggggggaggccctgctgatcacccctgtgctgcaggctgggaaggctgaggtgactggctacttccccctgggcacctggtatgatctgcagactgtgcccattgaggccctggggtctctgccccccccccctgctgctcccagagagcctgccatccattctgagggccagtgggtgaccctgcctgcccccctggacaccattaatgtgcacctgagggctggctacattatccccctgcagggccctggcctgaccaccactgagagcaggcagcagcctatggctctggctgtggccctgaccaaggggggggaggccaggggggagctgttttgggatgatggggagagcctggaggtgctggagaggggggcctacacccaggtgatcttcctggccaggaacaacactattgtgaatgaactggtgagggtcacttctgagggggctgggctgcagctgcagaaggtgactgtgctgggggtggccactgctccccagcaggtgctgagcaatggggtgcctgtgagcaacttcacctacagccctgataccaaggtgctggacatctgtgtgagcctgctgatgggggagcagttcctggtgagctggtgctgatttaaatctcgagccgggcggagtgtgttagtctctccagagggaggctggttccccagggaagcagagcctgtgtgcgggcagcagctgtgtgcgggcctgggggttgttaagtgcaattatttttaataaaaggggcatttggaaaaaaaaaaaaaaggtagcagtcgacagatgaattctgcagatctgtggcttctagctgcccgggtggcatccctgtgacccctccccagtgcctctcctggccctggaagttgccactccagtgcccaccagccttgtcctaataaaattaagttgcatcattttgtctgactaggtgtccttctataatattatggggtggaggggggtggtatggagcaaggggcaagttgggaagacaacctgtagggcctgcggggtctattgggaaccaagctggagtgcagtggcacaatcttggctcactgcaatctccgcctcctgggttcaagcgattctcctgcctcagcctcccgagttgttgggattccaggcatgcatgaccaggctcagctaatttttgtttttttggtagagacggggtttcaccatattggccaggctggtctccaactcctaatctcaggtgatctacccaccttggcctcccaaattgctgggattacaggcgtgaaccactgctcccttccctgtccttctgattttaaaaaaaagagaaatgttctggcacctgcacttgcactggggacagcctattttgctagtttgttttgtttcgttttgttttgatggagagcgtatgttgtttaaacgcggccgcgtagataagtagcatggcgggttaatcattaactacaaggaacccctagtgatggagttggccactccctctctgcgcgctcgctcgctcactgaggccgggcgaccaaaggtcgcccgacgcccgggctttgcccgggcggcctcagtgagcgagcgagcgcgcagttaattaaggcgccctaggccgacccttagactctgtactcagttctataaacgagccattggatacgagatccgtagattgataagggacacggaatatccccggacgcaatagacaccggtggacagcttggtatcctgagcacagtcgcgcgtccgaatctagctctactttagaggccccggattctgatggtcgtagaccgcagaaccgattggggggatgagatctactagttatcagcacacaattgcccattatacgcgcgtataatggactattgtgtgctgatatagggataacagggtaattctagagctagcatatggatccatcgatttgatgcggtattttctccttacgcatctgtgcggtatttcacaccgcatacgtcaaagcaaccatagtacgcgccctgtagcggcgcattaagcgcggcgggtgtggtggttacgcgcagcgtgaccgctacacttgccagcgccctagcgcccgctcctttcgctttcttcccttcctttctcgccacgttcgccggctttccccgtcaagctctaaatcgggggctccctttagggttccgatttagtgctttacggcacctcgaccccaaaaaacttgatttgggtgatggttcacgtagtgggccatcgccctgatagacggtttttcgccctttgacgttggagtccacgttctttaatagtggactcttgttccaaactggaacaacactcaactctatctcgggctattcttttgatttataagggattttgccgatttcggtctattggttaaaaaatgagctgatttaacaaaaatttaacgcgaattttaacaaaatattaacgtttacaattttatggtgcactctcagtacaatctgctctgatgccgcatagttaagccagccccgacacccgccaacacccgctgacgcgccctgacgggcttgtctgctcccggcatccgcttacagacaagctgtgaccgtctccgggagctgcatgtgtcagaggttttcaccgtcatcaccgaaacgcgcgagacgaaagggcctcgtgatacgcctatttttataggttaatgtcatgataataatggtttcttagacgtcaggtggcacttttcggggaaatgtgcgcggaacccctatttgtttatttttctaaatacattcaaatatgtatccgctcatgagacaataaccctgataaatgcttcaataatattgaaaaaggaagagtatgagccatattcaacgggaaacgtcgaggccgcgattaaattccaacatggatgctgatttatatgggtataaatgggctcgcgataatgtcgggcaatcaggtgcgacaatctatcgcttgtatgggaagcccgatgcgccagagttgtttctgaaacatggcaaaggtagcgttgccaatgatgttacagatgagatggtcagactaaactggctgacggaatttatgcctcttccgaccatcaagcattttatccgtactcctgatgatgcatggttactcaccactgcgatccccggaaaaacagcattccaggtattagaagaatatcctgattcaggtgaaaatattgttgatgcgctggcagtgttcctgcgccggttgcattcgattcctgtttgtaattgtccttttaacagcgatcgcgtatttcgtctcgctcaggcgcaatcacgaatgaataacggtttggttgatgcgagtgattttgatgacgagcgtaatggctggcctgttgaacaagtctggaaagaaatgcataaacttttgccattctcaccggattcagtcgtcactcatggtgatttctcacttgataaccttatttttgacgaggggaaattaataggttgtattgatgttggacgagtcggaatcgcagaccgataccaggatcttgccatcctatggaactgcctcggtgagttttctccttcattacagaaacggctttttcaaaaatatggtattgataatcctgatatgaataaattgcagtttcatttgatgctcgatgagtttttctaagcgtataatggtctagagctagcatatggatccatcgattccattatacgcctgtcagaccaagtttactcatatatactttagattgatttaaaacttcatttttaatttaaaaggatctaggtgaagatcctttttgataatctcatgaccaaaatcccttaacgtgagttttcgttccactgagcgtcagaccccgtagaaaagatcaaaggatcttcttgagatcctttttttctgcgcgtaatctgctgcttgcaaacaaaaaaaccaccgctaccagcggtggtttgtttgccggatcaagagctaccaactctttttccgaaggtaactggcttcagcagagcgcagataccaaatactgttcttctagtgtagccgtagttaggccaccacttcaagaactctgtagcaccgcctacatacctcgctctgctaatcctgttaccagtggctgctgccagtggcgataagtcgtgtcttaccgggttggactcaagacgatagttaccggataaggcgcagcggtcgggctgaacggggggttcgtgcacacagcccagcttggagcgaacgacctacaccgaactgagatacctacagcgtgagctatgagaaagcgccacgcttcccgaagggagaaaggcggacaggtatccggtaagcggcagggtcggaacaggagagcgcacgagggagcttccagggggaaacgcctggtatctttatagtcctgtcgggtttcgccacctctgacttgagcgtcgatttttgtgatgctcgtcaggggggcggagcctatggaaaaacgccagcaacgcggcctttttacggttcctggccttttgctggccttttgctcacatgt

SEQ ID NO: 31 - DNA, 4691 bp, synthetic construct
  source 1..4691: mol_type = other DNA
ctgcgcgctcgctcgctcactgaggccgcccgggcaaagcccgggcgtcgggcgacctttggtcgcccggcctcagtgagcgagcgagcgcgcagagagggagtggccaactccatcactaggggttccttgtagttaatgattaacccgccatgctacttatctacggcgcgccacgcgttctaggagttaatttttaaaaagcagtcaaaagtccaagtgcccttgcgagcatttactctctctgtttgctctggttaataatctcaggagcacaaacattccttactagttctaggagttaatttttaaaaagcagtcaaaagtccaagtgcccttgcgagcatttactctctctgtttgctctggttaataatctcaggagcacaaacattccttactagttctagagcggccgccagtgtgctggaattcggcttttttagggctggaagctacctttgacatcatttcctctgcgaatgcatgtataatttctacagaacctattagaaaggatcacccagcctctgcttttgtacaactttcccttaaaaaactgccaatcccactgctgtttggcccaatagtgagaactttttcctgctgcctcttggtgcttttgcctatggcccctattctgcctgctgaagacactcttgccagcatggacttaaacccctccagctctgacaatcctctttctcttttgttttacatgaagggtctggcagccaaagcaatcactcaaagttcaaaccttatcattttttgctttgttcctcttggccttggttttgtacatcagctttgaaaataccatcccagggttaatgctggggttaatttataactgagagtgctctagttctgcaatacaggacatgctataaaaatggaaagatgttgctttctgagagatcaggtggattcttgggcatttgcttaagcttggtaccgccaccatggagtttgggctgagctgggtctttctggtggccctgctgaagggagtccagtgtgagcagcagggggccagcaggccaggccccagggatgcccaggcccaccctggcagacccagggctgtgcccacccagtgtgatgtgcctcccaacagcagatttgactgtgcccctgataaggccattactcaggaacagtgtgaggccaggggctgctgctatatccctgccaagcagggcctgcagggggcccagatggggcagccctggtgcttcttcccccccagctacccctcttataagctggagaatctgagcagctctgaaatgggctacactgccactctgaccaggactacccccaccttcttccccaaggatattctgactctgaggctggatgtgatgatggagactgagaacaggctgcacttcaccatcaaggaccctgccaacaggaggtatgaggtgcccctggaaactcccagggtgcactctagggcccccagccccctgtattctgtggagttctctgaggagccttttggggtcattgtccacaggcagctggatggcagggtgctgctgaatactactgtggcccctctgttctttgctgaccagttcctgcagctgagcaccagcctgccttctcagtacattactggcctggctgagcatctgagccccctgatgctgagcacctcttggaccagaatcaccctgtggaacagggacctggctcccactcctggggccaacctgtatggcagccaccccttctacctggccctggaggatgggggctctgcccatggggtgttcctgctgaacagcaatgccatggatgtggtgctgcagccctctcctgccctgtcttggagatctactgggggcatcctggatgtgtatatcttcctggggcctgagcccaagtctgtggtgcagcagtacctggatgtggtgggctaccccttcatgcccccctactggggcctgggcttccacctgtgcaggtggggctactcttctactgctatcaccaggcaggtggtggagaacatgaccagggctcacttccctctggatgtgcagtggaatgacctggactacatggactctaggagagacttcacttttaataaggatgggttcagggactttcctgccatggtgcaggagctgcatcaggggggcaggagatatatgatgattgtggaccctgctatttctagctctggccctgctggcagctataggccctatgatgaggggctgaggaggggggtgttcatcactaatgagactggccagcccctgattggcaaggtgtggcctggctctactgccttccctgatttcaccaaccccactgccctggcctggtgggaggatatggtggctgagtttcatgaccaggtgccctttgatggcatgtggattgacatgaatgagcccagcaactttatcaggggctctgaagatggctgccccaacaatgagctggagaaccccccctatgtgcctggggtggtggggggcaccctgcaggctgccaccatctgtgccagcagccaccagttcctgagcacccactataacctgcacaacctgtatggcctgactgaggccattgcctctcacagggccctggtgaaggctagggggactaggccctttgtgatcagcaggtctacttttgctggccatggcaggtatgctgggcactggactggggatgtgtggtctagctgggagcagctggccagctctgtgcctgagatcctgcagtttaatctgctgggggtgcccctggtgggggctgatgtgtgtggcttcctgggcaatacctctgaggagctgtgtgtgaggtggactcagctgggggctttctaccccttcatgagaaaccacaactctctgctgagcctgccccaggagccctattctttttctgagcctgcccagcaggctatgaggaaggccctgactctgaggtatgccctgctgccccacctgtataccctgttccatcaggcccatgtggctggggagactgtggccagacctctgttcctggagttccccaaggatagctctacttggactgtggaccaccagctgctgtggggggaggctctgctgatcacccctgtgctgcaggctgggaaggctgaggtgactggctatttccccctgggcacctggtatgatctgcagactgtgcccattgaggccctgggctctctgccccctccccctgctgcccccagggagcctgccatccactctgagggccagtgggtgaccctgcctgcccctctggacactatcaatgtgcacctgagggctggctacatcatccccctgcagggccctggcctgactaccactgagtctaggcagcagcccatggccctggctgtggctctgaccaaggggggggaggccaggggggagctgttctgggatgatggggagtctctggaggtgctggagaggggggcctacacccaggtgatcttcctggctaggaataacaccattgtcaatgagctggtgagggtgacctctgagggggctggcctgcagctgcagaaggtgactgtgctgggggtggctactgccccccagcaggtgctgagcaatggggtgcctgtgagcaacttcacctatagccctgacaccaaggtgctggacatctgtgtgagcctgctgatgggggagcagttcctggtgagctggtgctaatttaaatctcgagccgggcggagtgtgttagtctctccagagggaggctggttccccagggaagcagagcctgtgtgcgggcagcagctgtgtgcgggcctgggggttgttaagtgcaattatttttaataaaaggggcatttggaaaaaaaaaaaaaaggtagcagtcgacagatgaattctgcagatctgtggcttctagctgcccgggtggcatccctgtgacccctccccagtgcctctcctggccctggaagttgccactccagtgcccaccagccttgtcctaataaaattaagttgcatcattttgtctgactaggtgtccttctataatattatggggtggaggggggtggtatggagcaaggggcaagttgggaagacaacctgtagggcctgcggggtctattgggaaccaagctggagtgcagtggcacaatcttggctcactgcaatctccgcctcctgggttcaagcgattctcctgcctcagcctcccgagttgttgggattccaggcatgcatgaccaggctcagctaatttttgtttttttggtagagacggggtttcaccatattggccaggctggtctccaactcctaatctcaggtgatctacccaccttggcctcccaaattgctgggattacaggcgtgaaccactgctcccttccctgtccttctgattttaaaaaaaagagaaatgttctggcacctgcacttgcactggggacagcctattttgctagtttgttttgtttcgttttgttttgatggagagcgtatgttgtttaaacgcggccgcgtagataagtagcatggcgggttaatcattaactacaaggaacccctagtgatggagttggccactccctctctgcgcgctcgctcgctcactgaggccgggcgaccaaaggtcgcccgacgcccgggctttgcccgggcggcctcagtgagcgagcgagcgcgcag

SEQ ID NO: 32 - DNA, 4691 bp, synthetic construct
  source 1..4691: mol_type = other DNA
ctgcgcgctcgctcgctcactgaggccgcccgggcaaagcccgggcgtcgggcgacctttggtcgcccggcctcagtgagcgagcgagcgcgcagagagggagtggccaactccatcactaggggttccttgtagttaatgattaacccgccatgctacttatctacggcgcgccacgcgttctaggagttaatttttaaaaagcagtcaaaagtccaagtgcccttgcgagcatttactctctctgtttgctctggttaataatctcaggagcacaaacattccttactagttctaggagttaatttttaaaaagcagtcaaaagtccaagtgcccttgcgagcatttactctctctgtttgctctggttaataatctcaggagcacaaacattccttactagttctagagcggccgccagtgtgctggaattcggcttttttagggctggaagctacctttgacatcatttcctctgcgaatgcatgtataatttctacagaacctattagaaaggatcacccagcctctgcttttgtacaactttcccttaaaaaactgccaatcccactgctgtttggcccaatagtgagaactttttcctgctgcctcttggtgcttttgcctatggcccctattctgcctgctgaagacactcttgccagcatggacttaaacccctccagctctgacaatcctctttctcttttgttttacatgaagggtctggcagccaaagcaatcactcaaagttcaaaccttatcattttttgctttgttcctcttggccttggttttgtacatcagctttgaaaataccatcccagggttaatgctggggttaatttataactgagagtgctctagttctgcaatacaggacatgctataaaaatggaaagatgttgctttctgagagatcaggtggattcttgggcatttgcttaagcttggtaccgccaccatgtacagaatgcagctgctgtcctgcattgcactgtcactggcactggttaccaactcacagcagggggccagcaggccaggccccagggatgcccaggcccaccctggcagacccagggctgtgcccacccagtgtgatgtgcctcccaacagcagatttgactgtgcccctgataaggccattactcaggaacagtgtgaggccaggggctgctgctatatccctgccaagcagggcctgcagggggcccagatggggcagccctggtgcttcttcccccccagctacccctcttataagctggagaatctgagcagctctgaaatgggctacactgccactctgaccaggactacccccaccttcttccccaaggatattctgactctgaggctggatgtgatgatggagactgagaacaggctgcacttcaccatcaaggaccctgccaacaggaggtatgaggtgcccctggaaactcccagggtgcactctagggcccccagccccctgtattctgtggagttctctgaggagccttttggggtcattgtccacaggcagctggatggcagggtgctgctgaatactactgtggcccctctgttctttgctgaccagttcctgcagctgagcaccagcctgccttctcagtacattactggcctggctgagcatctgagccccctgatgctgagcacctcttggaccagaatcaccctgtggaacagggacctggctcccactcctggggccaacctgtatggcagccaccccttctacctggccctggaggatgggggctctgcccatggggtgttcctgctgaacagcaatgccatggatgtggtgctgcagccctctcctgccctgtcttggagatctactgggggcatcctggatgtgtatatcttcctggggcctgagcccaagtctgtggtgcagcagtacctggatgtggtgggctaccccttcatgcccccctactggggcctgggcttccacctgtgcaggtggggctactcttctactgctatcaccaggcaggtggtggagaacatgaccagggctcacttccctctggatgtgcagtggaatgacctggactacatggactctaggagagacttcacttttaataaggatgggttcagggactttcctgccatggtgcaggagctgcatcaggggggcaggagatatatgatgattgtggaccctgctatttctagctctggccctgctggcagctataggccctatgatgaggggctgaggaggggggtgttcatcactaatgagactggccagcccctgattggcaaggtgtggcctggctctactgccttccctgatttcaccaaccccactgccctggcctggtgggaggatatggtggctgagtttcatgaccaggtgccctttgatggcatgtggattgacatgaatgagcccagcaactttatcaggggctctgaagatggctgccccaacaatgagctggagaaccccccctatgtgcctggggtggtggggggcaccctgcaggctgccaccatctgtgccagcagccaccagttcctgagcacccactataacctgcacaacctgtatggcctgactgaggccattgcctctcacagggccctggtgaaggctagggggactaggccctttgtgatcagcaggtctacttttgctggccatggcaggtatgctgggcactggactggggatgtgtggtctagctgggagcagctggccagctctgtgcctgagatcctgcagtttaatctgctgggggtgcccctggtgggggctgatgtgtgtggcttcctgggcaatacctctgaggagctgtgtgtgaggtggactcagctgggggctttctaccccttcatgagaaaccacaactctctgctgagcctgccccaggagccctattctttttctgagcctgcccagcaggctatgaggaaggccctgactctgaggtatgccctgctgccccacctgtataccctgttccatcaggcccatgtggctggggagactgtggccagacctctgttcctggagttccccaaggatagctctacttggactgtggaccaccagctgctgtggggggaggctctgctgatcacccctgtgctgcaggctgggaaggctgaggtgactggctatttccccctgggcacctggtatgatctgcagactgtgcccattgaggccctgggctctctgccccctccccctgctgcccccagggagcctgccatccactctgagggccagtgggtgaccctgcctgcccctctggacactatcaatgtgcacctgagggctggctacatcatccccctgcagggccctggcctgactaccactgagtctaggcagcagcccatggccctggctgtggctctgaccaaggggggggaggccaggggggagctgttctgggatgatggggagtctctggaggtgctggagaggggggcctacacccaggtgatcttcctggctaggaataacaccattgtcaatgagctggtgagggtgacctctgagggggctggcctgcagctgcagaaggtgactgtgctgggggtggctactgccccccagcaggtgctgagcaatggggtgcctgtgagcaacttcacctatagccctgacaccaaggtgctggacatctgtgtgagcctgctgatgggggagcagttcctggtgagctggtgctaatttaaatctcgagccgggcggagtgtgttagtctctccagagggaggctggttccccagggaagcagagcctgtgtgcgggcagcagctgtgtgcgggcctgggggttgttaagtgcaattatttttaataaaaggggcatttggaaaaaaaaaaaaaaggtagcagtcgacagatgaattctgcagatctgtggcttctagctgcccgggtggcatccctgtgacccctccccagtgcctctcctggccctggaagttgccactccagtgcccaccagccttgtcctaataaaattaagttgcatcattttgtctgactaggtgtccttctataatattatggggtggaggggggtggtatggagcaaggggcaagttgggaagacaacctgtagggcctgcggggtctattgggaaccaagctggagtgcagtggcacaatcttggctcactgcaatctccgcctcctgggttcaagcgattctcctgcctcagcctcccgagttgttgggattccaggcatgcatgaccaggctcagctaatttttgtttttttggtagagacggggtttcaccatattggccaggctggtctccaactcctaatctcaggtgatctacccaccttggcctcccaaattgctgggattacaggcgtgaaccactgctcccttccctgtccttctgattttaaaaaaaagagaaatgttctggcacctgcacttgcactggggacagcctattttgctagtttgttttgtttcgttttgttttgatggagagcgtatgttgtttaaacgcggccgcgtagataagtagcatggcgggttaatcattaactacaaggaacccctagtgatggagttggccactccctctctgcgcgctcgctcgctcactgaggccgggcgaccaaaggtcgcccgacgcccgggctttgcccgggcggcctcagtgagcgagcgagcgcgcag

SEQ ID NO: 33 - DNA, 4691 bp, synthetic construct
  source 1..4691: mol_type = other DNA
ctgcgcgctcgctcgctcactgaggccgcccgggcaaagcccgggcgtcgggcgacctttggtcgcccggcctcagtgagcgagcgagcgcgcagagagggagtggccaactccatcactaggggttccttgtagttaatgattaacccgccatgctacttatctacggcgcgccacgcgttctaggagttaatttttaaaaagcagtcaaaagtccaagtgcccttgcgagcatttactctctctgtttgctctggttaataatctcaggagcacaaacattccttactagttctaggagttaatttttaaaaagcagtcaaaagtccaagtgcccttgcgagcatttactctctctgtttgctctggttaataatctcaggagcacaaacattccttactagttctagagcggccgccagtgtgctggaattcggcttttttagggctggaagctacctttgacatcatttcctctgcgaatgcatgtataatttctacagaacctattagaaaggatcacccagcctctgcttttgtacaactttcccttaaaaaactgccaatcccactgctgtttggcccaatagtgagaactttttcctgctgcctcttggtgcttttgcctatggcccctattctgcctgctgaagacactcttgccagcatggacttaaacccctccagctctgacaatcctctttctcttttgttttacatgaagggtctggcagccaaagcaatcactcaaagttcaaaccttatcattttttgctttgttcctcttggccttggttttgtacatcagctttgaaaataccatcccagggttaatgctggggttaatttataactgagagtgctctagttctgcaatacaggacatgctataaaaatggaaagatgttgctttctgagagatcaggtggattcttgggcatttgcttaagcttggtaccgccaccatgtacagaatgcagctgctgctgctgattgcactgtcactggcactggttaccaactcacagcagggggccagcaggccaggccccagggatgcccaggcccaccctggcagacccagggctgtgcccacccagtgtgatgtgcctcccaacagcagatttgactgtgcccctgataaggccattactcaggaacagtgtgaggccaggggctgctgctatatccctgccaagcagggcctgcagggggcccagatggggcagccctggtgcttcttcccccccagctacccctcttataagctggagaatctgagcagctctgaaatgggctacactgccactctgaccaggactacccccaccttcttccccaaggatattctgactctgaggctggatgtgatgatggagactgagaacaggctgcacttcaccatcaaggaccctgccaacaggaggtatgaggtgcccctggaaactcccagggtgcactctagggcccccagccccctgtattctgtggagttctctgaggagccttttggggtcattgtccacaggcagctggatggcagggtgctgctgaatactactgtggcccctctgttctttgctgaccagttcctgcagctgagcaccagcctgccttctcagtacattactggcctggctgagcatctgagccccctgatgctgagcacctcttggaccagaatcaccctgtggaacagggacctggctcccactcctggggccaacctgtatggcagccaccccttctacctggccctggaggatgggggctctgcccatggggtgttcctgctgaacagcaatgccatggatgtggtgctgcagccctctcctgccctgtcttggagatctactgggggcatcctggatgtgtatatcttcctggggcctgagcccaagtctgtggtgcagcagtacctggatgtggtgggctaccccttcatgcccccctactggggcctgggcttccacctgtgcaggtggggctactcttctactgctatcaccaggcaggtggtggagaacatgaccagggctcacttccctctggatgtgcagtggaatgacctggactacatggactctaggagagacttcacttttaataaggatgggttcagggactttcctgccatggtgcaggagctgcatcaggggggcaggagatatatgatgattgtggaccctgctatttctagctctggccctgctggcagctataggccctatgatgaggggctgaggaggggggtgttcatcactaatgagactggccagcccctgattggcaaggtgtggcctggctctactgccttccctgatttcaccaaccccactgccctggcctggtgggaggatatggtggctgagtttcatgaccaggtgccctttgatggcatgtggattgacatgaatgagcccagcaactttatcaggggctctgaagatggctgccccaacaatgagctggagaaccccccctatgtgcctggggtggtggggggcaccctgcaggctgccaccatctgtgccagcagccaccagttcctgagcacccactataacctgcacaacctgtatggcctgactgaggccattgcctctcacagggccctggtgaaggctagggggactaggccctttgtgatcagcaggtctacttttgctggccatggcaggtatgctgggcactggactggggatgtgtggtctagctgggagcagctggccagctctgtgcctgagatcctgcagtttaatctgctgggggtgcccctggtgggggctgatgtgtgtggcttcctgggcaatacctctgaggagctgtgtgtgaggtggactcagctgggggctttctaccccttcatgagaaaccacaactctctgctgagcctgccccaggagccctattctttttctgagcctgcccagcaggctatgaggaaggccctgactctgaggtatgccctgctgccccacctgtataccctgttccatcaggcccatgtggctggggagactgtggccagacctctgttcctggagttccccaaggatagctctacttggactgtggaccaccagctgctgtggggggaggctctgctgatcacccctgtgctgcaggctgggaaggctgaggtgactggctatttccccctgggcacctggtatgatctgcagactgtgcccattgaggccctgggctctctgccccctccccctgctgcccccagggagcctgccatccactctgagggccagtgggtgaccctgcctgcccctctggacactatcaatgtgcacctgagggctggctacatcatccccctgcagggccctggcctgactaccactgagtctaggcagcagcccatggccctggctgtggctctgaccaaggggggggaggccaggggggagctgttctgggatgatggggagtctctggaggtgctggagaggggggcctacacccaggtgatcttcctggctaggaataacaccattgtcaatgagctggtgagggtgacctctgagggggctggcctgcagctgcagaaggtgactgtgctgggggtggctactgccccccagcaggtgctgagcaatggggtgcctgtgagcaacttcacctatagccctgacaccaaggtgctggacatctgtgtgagcctgctgatgggggagcagttcctggtgagctggtgctaatttaaatctcgagccgggcggagtgtgttagtctctccagagggaggctggttccccagggaagcagagcctgtgtgcgggcagcagctgtgtgcgggcctgggggttgttaagtgcaattatttttaataaaaggggcatttggaaaaaaaaaaaaaaggtagcagtcgacagatgaattctgcagatctgtggcttctagctgcccgggtggcatccctgtgacccctccccagtgcctctcctggccctggaagttgccactccagtgcccaccagccttgtcctaataaaattaagttgcatcattttgtctgactaggtgtccttctataatattatggggtggaggggggtggtatggagcaaggggcaagttgggaagacaacctgtagggcctgcggggtctattgggaaccaagctggagtgcagtggcacaatcttggctcactgcaatctccgcctcctgggttcaagcgattctcctgcctcagcctcccgagttgttgggattccaggcatgcatgaccaggctcagctaatttttgtttttttggtagagacggggtttcaccatattggccaggctggtctccaactcctaatctcaggtgatctacccaccttggcctcccaaattgctgggattacaggcgtgaaccactgctcccttccctgtccttctgattttaaaaaaaagagaaatgttctggcacctgcacttgcactggggacagcctattttgctagtttgttttgtttcgttttgttttgatggagagcgtatgttgtttaaacgcggccgcgtagataagtagcatggcgggttaatcattaactacaaggaacccctagtgatggagttggccactccctctctgcgcgctcgctcgctcactgaggccgggcgaccaaaggtcgcccgacgcccgggctttgcccgggcggcctcagtgagcgagcgagcgcgcag

SEQ ID NO: 34 - DNA, 4700 bp, synthetic construct
  source 1..4700: mol_type = other DNA
ctgcgcgctcgctcgctcactgaggccgcccgggcaaagcccgggcgtcgggcgacctttggtcgcccggcctcagtgagcgagcgagcgcgcagagagggagtggccaactccatcactaggggttccttgtagttaatgattaacccgccatgctacttatctacggcgcgccacgcgttctaggagttaatttttaaaaagcagtcaaaagtccaagtgcccttgcgagcatttactctctctgtttgctctggttaataatctcaggagcacaaacattccttactagttctaggagttaatttttaaaaagcagtcaaaagtccaagtgcccttgcgagcatttactctctctgtttgctctggttaataatctcaggagcacaaacattccttactagttctagagcggccgccagtgtgctggaattcggcttttttagggctggaagctacctttgacatcatttcctctgcgaatgcatgtataatttctacagaacctattagaaaggatcacccagcctctgcttttgtacaactttcccttaaaaaactgccaatcccactgctgtttggcccaatagtgagaactttttcctgctgcctcttggtgcttttgcctatggcccctattctgcctgctgaagacactcttgccagcatggacttaaacccctccagctctgacaatcctctttctcttttgttttacatgaagggtctggcagccaaagcaatcactcaaagttcaaaccttatcattttttgctttgttcctcttggccttggttttgtacatcagctttgaaaataccatcccagggttaatgctggggttaatttataactgagagtgctctagttctgcaatacaggacatgctataaaaatggaaagatgttgctttctgagagatcaggtggattcttgggcatttgcttaagcttggtaccgccaccatggggaagaacaaactccttcatccaagtctggttcttctcctcttggtcctcctgcccacagatgcccagcagggggccagcaggccaggccccagggatgcccaggcccaccctggcagacccagggctgtgcccacccagtgtgatgtgcctcccaacagcagatttgactgtgcccctgataaggccattactcaggaacagtgtgaggccaggggctgctgctatatccctgccaagcagggcctgcagggggcccagatggggcagccctggtgcttcttcccccccagctacccctcttataagctggagaatctgagcagctctgaaatgggctacactgccactctgaccaggactacccccaccttcttccccaaggatattctgactctgaggctggatgtgatgatggagactgagaacaggctgcacttcaccatcaaggaccctgccaacaggaggtatgaggtgcccctggaaactcccagggtgcactctagggcccccagccccctgtattctgtggagttctctgaggagccttttggggtcattgtccacaggcagctggatggcagggtgctgctgaatactactgtggcccctctgttctttgctgaccagttcctgcagctgagcaccagcctgccttctcagtacattactggcctggctgagcatctgagccccctgatgctgagcacctcttggaccagaatcaccctgtggaacagggacctggctcccactcctggggccaacctgtatggcagccaccccttctacctggccctggaggatgggggctctgcccatggggtgttcctgctgaacagcaatgccatggatgtggtgctgcagccctctcctgccctgtcttggagatctactgggggcatcctggatgtgtatatcttcctggggcctgagcccaagtctgtggtgcagcagtacctggatgtggtgggctaccccttcatgcccccctactggggcctgggcttccacctgtgcaggtggggctactcttctactgctatcaccaggcaggtggtggagaacatgaccagggctcacttccctctggatgtgcagtggaatgacctggactacatggactctaggagagacttcacttttaataaggatgggttcagggactttcctgccatggtgcaggagctgcatcaggggggcaggagatatatgatgattgtggaccctgctatttctagctctggccctgctggcagctataggccctatgatgaggggctgaggaggggggtgttcatcactaatgagactggccagcccctgattggcaaggtgtggcctggctctactgccttccctgatttcaccaaccccactgccctggcctggtgggaggatatggtggctgagtttcatgaccaggtgccctttgatggcatgtggattgacatgaatgagcccagcaactttatcaggggctctgaagatggctgccccaacaatgagctggagaaccccccctatgtgcctggggtggtggggggcaccctgcaggctgccaccatctgtgccagcagccaccagttcctgagcacccactataacctgcacaacctgtatggcctgactgaggccattgcctctcacagggccctggtgaaggctagggggactaggccctttgtgatcagcaggtctacttttgctggccatggcaggtatgctgggcactggactggggatgtgtggtctagctgggagcagctggccagctctgtgcctgagatcctgcagtttaatctgctgggggtgcccctggtgggggctgatgtgtgtggcttcctgggcaatacctctgaggagctgtgtgtgaggtggactcagctgggggctttctaccccttcatgagaaaccacaactctctgctgagcctgccccaggagccctattctttttctgagcctgcccagcaggctatgaggaaggccctgactctgaggtatgccctgctgccccacctgtataccctgttccatcaggcccatgtggctggggagactgtggccagacctctgttcctggagttccccaaggatagctctacttggactgtggaccaccagctgctgtggggggaggctctgctgatcacccctgtgctgcaggctgggaaggctgaggtgactggctatttccccctgggcacctggtatgatctgcagactgtgcccattgaggccctgggctctctgccccctccccctgctgcccccagggagcctgccatccactctgagggccagtgggtgaccctgcctgcccctctggacactatcaatgtgcacctgagggctggctacatcatccccctgcagggccctggcctgactaccactgagtctaggcagcagcccatggccctggctgtggctctgaccaaggggggggaggccaggggggagctgttctgggatgatggggagtctctggaggtgctggagaggggggcctacacccaggtgatcttcctggctaggaataacaccattgtcaatgagctggtgagggtgacctctgagggggctggcctgcagctgcagaaggtgactgtgctgggggtggctactgccccccagcaggtgctgagcaatggggtgcctgtgagcaacttcacctatagccctgacaccaaggtgctggacatctgtgtgagcctgctgatgggggagcagttcctggtgagctggtgctaatttaaatctcgagccgggcggagtgtgttagtctctccagagggaggctggttccccagggaagcagagcctgtgtgcgggcagcagctgtgtgcgggcctgggggttgttaagtgcaattatttttaataaaaggggcatttggaaaaaaaaaaaaaaggtagcagtcgacagatgaattctgcagatctgtggcttctagctgcccgggtggcatccctgtgacccctccccagtgcctctcctggccctggaagttgccactccagtgcccaccagccttgtcctaataaaattaagttgcatcattttgtctgactaggtgtccttctataatattatggggtggaggggggtggtatggagcaaggggcaagttgggaagacaacctgtagggcctgcggggtctattgggaaccaagctggagtgcagtggcacaatcttggctcactgcaatctccgcctcctgggttcaagcgattctcctgcctcagcctcccgagttgttgggattccaggcatgcatgaccaggctcagctaatttttgtttttttggtagagacggggtttcaccatattggccaggctggtctccaactcctaatctcaggtgatctacccaccttggcctcccaaattgctgggattacaggcgtgaaccactgctcccttccctgtccttctgattttaaaaaaaagagaaatgttctggcacctgcacttgcactggggacagcctattttgctagtttgttttgtttcgttttgttttgatggagagcgtatgttgtttaaacgcggccgcgtagataagtagcatggcgggttaatcattaactacaaggaacccctagtgatggagttggccactccctctctgcgcgctcgctcgctcactgaggccgggcgaccaaaggtcgcccgacgcccgggctttgcccgggcggcctcagtgagcgagcgagcgcgcag

SEQ ID NO: 35 - DNA, 4706 bp, synthetic construct
  source 1..4706: mol_type = other DNA
ctgcgcgctcgctcgctcactgaggccgcccgggcaaagcccgggcgtcgggcgacctttggtcgcccggcctcagtgagcgagcgagcgcgcagagagggagtggccaactccatcactaggggttccttgtagttaatgattaacccgccatgctacttatctacggcgcgccacgcgttctaggagttaatttttaaaaagcagtcaaaagtccaagtgcccttgcgagcatttactctctctgtttgctctggttaataatctcaggagcacaaacattccttactagttctaggagttaatttttaaaaagcagtcaaaagtccaagtgcccttgcgagcatttactctctctgtttgctctggttaataatctcaggagcacaaacattccttactagttctagagcggccgccagtgtgctggaattcggcttttttagggctggaagctacctttgacatcatttcctctgcgaatgcatgtataatttctacagaacctattagaaaggatcacccagcctctgcttttgtacaactttcccttaaaaaactgccaatcccactgctgtttggcccaatagtgagaactttttcctgctgcctcttggtgcttttgcctatggcccctattctgcctgctgaagacactcttgccagcatggacttaaacccctccagctctgacaatcctctttctcttttgttttacatgaagggtctggcagccaaagcaatcactcaaagttcaaaccttatcattttttgctttgttcctcttggccttggttttgtacatcagctttgaaaataccatcccagggttaatgctggggttaatttataactgagagtgctctagttctgcaatacaggacatgctataaaaatggaaagatgttgctttctgagagatcaggtggattcttgggcatttgcttaagcttggtaccgccaccatgagaaaagacagacttcttcatttatgtcttgtgctacttcttatcctgctttctgccagtgactcaaactctcagcagggggccagcaggccaggccccagggatgcccaggcccaccctggcagacccagggctgtgcccacccagtgtgatgtgcctcccaacagcagatttgactgtgcccctgataaggccattactcaggaacagtgtgaggccaggggctgctgctatatccctgccaagcagggcctgcagggggcccagatggggcagccctggtgcttcttcccccccagctacccctcttataagctggagaatctgagcagctctgaaatgggctacactgccactctgaccaggactacccccaccttcttccccaaggatattctgactctgaggctggatgtgatgatggagactgagaacaggctgcacttcaccatcaaggaccctgccaacaggaggtatgaggtgcccctggaaactcccagggtgcactctagggcccccagccccctgtattctgtggagttctctgaggagccttttggggtcattgtccacaggcagctggatggcagggtgctgctgaatactactgtggcccctctgttctttgctgaccagttcctgcagctgagcaccagcctgccttctcagtacattactggcctggctgagcatctgagccccctgatgctgagcacctcttggaccagaatcaccctgtggaacagggacctggctcccactcctggggccaacctgtatggcagccaccccttctacctggccctggaggatgggggctctgcccatggggtgttcctgctgaacagcaatgccatggatgtggtgctgcagccctctcctgccctgtcttggagatctactgggggcatcctggatgtgtatatcttcctggggcctgagcccaagtctgtggtgcagcagtacctggatgtggtgggctaccccttcatgcccccctactggggcctgggcttccacctgtgcaggtggggctactcttctactgctatcaccaggcaggtggtggagaacatgaccagggctcacttccctctggatgtgcagtggaatgacctggactacatggactctaggagagacttcacttttaataaggatgggttcagggactttcctgccatggtgcaggagctgcatcaggggggcaggagatatatgatgattgtggaccctgctatttctagctctggccctgctggcagctataggccctatgatgaggggctgaggaggggggtgttcatcactaatgagactggccagcccctgattggcaaggtgtggcctggctctactgccttccctgatttcaccaaccccactgccctggcctggtgggaggatatggtggctgagtttcatgaccaggtgccctttgatggcatgtggattgacatgaatgagcccagcaactttatcaggggctctgaagatggctgccccaacaatgagctggagaaccccccctatgtgcctggggtggtggggggcaccctgcaggctgccaccatctgtgccagcagccaccagttcctgagcacccactataacctgcacaacctgtatggcctgactgaggccattgcctctcacagggccctggtgaaggctagggggactaggccctttgtgatcagcaggtctacttttgctggccatggcaggtatgctgggcactggactggggatgtgtggtctagctgggagcagctggccagctctgtgcctgagatcctgcagtttaatctgctgggggtgcccctggtgggggctgatgtgtgtggcttcctgggcaatacctctgaggagctgtgtgtgaggtggactcagctgggggctttctaccccttcatgagaaaccacaactctctgctgagcctgccccaggagccctattctttttctgagcctgcccagcaggctatgaggaaggccctgactctgaggtatgccctgctgccccacctgtataccctgttccatcaggcccatgtggctggggagactgtggccagacctctgttcctggagttccccaaggatagctctacttggactgtggaccaccagctgctgtggggggaggctctgctgatcacccctgtgctgcaggctgggaaggctgaggtgactggctatttccccctgggcacctggtatgatctgcagactgtgcccattgaggccctgggctctctgccccctccccctgctgcccccagggagcctgccatccactctgagggccagtgggtgaccctgcctgcccctctggacactatcaatgtgcacctgagggctggctacatcatccccctgcagggccctggcctgactaccactgagtctaggcagcagcccatggccctggctgtggctctgaccaaggggggggaggccaggggggagctgttctgggatgatggggagtctctggaggtgctggagaggggggcctacacccaggtgatcttcctggctaggaataacaccattgtcaatgagctggtgagggtgacctctgagggggctggcctgcagctgcagaaggtgactgtgctgggggtggctactgccccccagcaggtgctgagcaatggggtgcctgtgagcaacttcacctatagccctgacaccaaggtgctggacatctgtgtgagcctgctgatgggggagcagttcctggtgagctggtgctaatttaaatctcgagccgggcggagtgtgttagtctctccagagggaggctggttccccagggaagcagagcctgtgtgcgggcagcagctgtgtgcgggcctgggggttgttaagtgcaattatttttaataaaaggggcatttggaaaaaaaaaaaaaaggtagcagtcgacagatgaattctgcagatctgtggcttctagctgcccgggtggcatccctgtgacccctccccagtgcctctcctggccctggaagttgccactccagtgcccaccagccttgtcctaataaaattaagttgcatcattttgtctgactaggtgtccttctataatattatggggtggaggggggtggtatggagcaaggggcaagttgggaagacaacctgtagggcctgcggggtctattgggaaccaagctggagtgcagtggcacaatcttggctcactgcaatctccgcctcctgggttcaagcgattctcctgcctcagcctcccgagttgttgggattccaggcatgcatgaccaggctcagctaatttttgtttttttggtagagacggggtttcaccatattggccaggctggtctccaactcctaatctcaggtgatctacccaccttggcctcccaaattgctgggattacaggcgtgaaccactgctcccttccctgtccttctgattttaaaaaaaagagaaatgttctggcacctgcacttgcactggggacagcctattttgctagtttgttttgtttcgttttgttttgatggagagcgtatgttgtttaaacgcggccgcgtagataagtagcatggcgggttaatcattaactacaaggaacccctagtgatggagttggccactccctctctgcgcgctcgctcgctcactgaggccgggcgaccaaaggtcgcccgacgcccgggctttgcccgggcggcctcagtgagcgagcgagcgcgcag

SEQ ID NO: 36 - DNA, 8061 bp, synthetic construct
  source 1..8061: mol_type = other DNA
tctagagctagcatatggatccatcgatttagggataacagggtaattatcagcacacaattgcccattatacgcgcgtataatggactattgtgtgctgatatctgtacacttaagggctagatcttagcttacgtcactagagggtccacgtttagtttttaagatccattgatctcctaaacgctgcaagattcgcaacctggtatacttagcctaggcgctaggtcctagtgcagcgggactttttttctaaagtcgttgagaggaggagtcgtcagaccagatagctttgatgtcctgatcggaaggatcgttggcccccctgcaggcagctgttaattaactgcgcgctcgctcgctcactgaggccgcccgggcaaagcccgggcgtcgggcgacctttggtcgcccggcctcagtgagcgagcgagcgcgcagagagggagtggccaactccatcactaggggttccttgtagttaatgattaacccgccatgctacttatctacggcgcgccacgcgttctaggagttaatttttaaaaagcagtcaaaagtccaagtgcccttgcgagcatttactctctctgtttgctctggttaataatctcaggagcacaaacattccttactagttctaggagttaatttttaaaaagcagtcaaaagtccaagtgcccttgcgagcatttactctctctgtttgctctggttaataatctcaggagcacaaacattccttactagttctagagcggccgccagtgtgctggaattcggcttttttagggctggaagctacctttgacatcatttcctctgcgaatgcatgtataatttctacagaacctattagaaaggatcacccagcctctgcttttgtacaactttcccttaaaaaactgccaatcccactgctgtttggcccaatagtgagaactttttcctgctgcctcttggtgcttttgcctatggcccctattctgcctgctgaagacactcttgccagcatggacttaaacccctccagctctgacaatcctctttctcttttgttttacatgaagggtctggcagccaaagcaatcactcaaagttcaaaccttatcattttttgctttgttcctcttggccttggttttgtacatcagctgtgaaaataccatcccagggtatttatagctggggttaatttataactgagagtgctctagttctgcaatacaggacatgctataaaaatggaaagatgttgctttctgagagatcagcttacatgtgctagcgtagccaaccatgggagtgaggcacccgccctgctcccaccggctcctggccgtctgcgccctcgtgtccttggcaaccgctgcactcctggggcacatcctactccatgatttcctgctggttccccgagagctgagtggctcctccccagtcctggaggagactcacccagctcaccagcagggagccagcagaccagggccccgggacgcccaggcacaccccggccgtcccagagcagtgcccacacagtgcgacgtcccccccaacagccgcttcgattgcgcccctgacaaggccatcacccaggaacagtgcgaggcccgcggctgctgctacatccctgcaaagcaggggctgcagggagcccagatggggcagccctggtgcttcttcccacccagctaccccagctacaagctggagaacctgagctcctctgaaatgggctacacggccaccctgacccgtaccacccccaccttcttccccaaggacatcctgaccctgcggctggacgtgatgatggagactgagaaccgcctccacttcacgatcaaagatccagctaacaggcgctacgaggtgcccttggagaccccgcgtgtccacagccgggcaccgtccccactctacagcgtggagttctccgaggagcccttcggggtgatcgtgcaccggcagctggacggccgcgtgctgctgaacacgacggtggcgcccctgttctttgcggaccagttccttcagctgtccacctcgctgccctcgcagtatatcacaggcctcgccgagcacctcagtcccctgatgctcagcaccagctggaccaggatcaccctgtggaaccgggaccttgcgcccacgcccggtgcgaacctctacgggtctcaccctttctacctggcgctggaggacggcgggtcggcacacggggtgttcctgctaaacagcaacgccatggacgtggtcctgcagccgagccctgcccttagctggaggtcgacaggtgggatcctggacgtctacatcttcctgggcccagagcccaagagcgtggtgcagcagtacctggacgtggtgggatacccgttcatgccgccatactggggcctgggcttccacctgtgccgctggggctactcctccaccgctatcacccgccaggtggtggagaacatgaccagggcccacttccccctggacgtccagtggaacgatctggactacatggactcccggagggacttcacgttcaacaaggatggcttccgggacttcccggccatggtgcaggagctgcaccagggcggccggcgctacatgatgatcgtggatcctgccatcagcagctcgggccctgccgggagctacaggccctacgacgagggtctgcggaggggggttttcatcaccaacgagaccggccagccgctgattgggaaggtgtggcccgggtccactgccttccccgacttcaccaaccccacagccctggcctggtgggaggacatggtggctgagttccatgaccaggtgcccttcgacggcatgtggattgacatgaacgagccttccaacttcatcagaggctctgaggacggctgccccaacaacgagctggagaacccaccctacgtgcctggggtggttggggggaccctccaggcggccaccatctgtgcctccagccaccagtttctctccacacactacaacctgcacaacctctacggcctgaccgaagccatcgcctcccacagggcgctggtgaaggctcgggggacacgcccatttgtgatctcccgctcgacctttgctggccacggccgatacgccggccactggacgggggacgtgtggagctcctgggagcagctcgcctcctccgtgccagaaatcctgcagtttaacctgctgggggtgcctctggtcggggccgacgtctgcggcttcctgggcaacacctcagaggagctgtgtgtgcgctggacccagctgggggccttctaccccttcatgcggaaccacaacagcctgctcagtctgccccaggagccgtacagcttcagcgagccggcccagcaggccatgaggaaggccctcaccctgcgctacgcactcctcccccacctctacacactgttccaccaggcccacgtcgcgggggagaccgtggcccggcccctcttcctggagttccccaaggactctagcacctggactgtggaccaccagctcctgtggggggaggccctgctcatcaccccagtgctccaggccgggaaggccgaagtgactggctacttccccttgggcacatggtacgacctgcagacggtgccaatagaggcccttggcagcctcccacccccacctgcagctccccgtgagccagccatccacagcgaggggcagtgggtgacgctgccggcccccctggacaccatcaacgtgcacctccgggctgggtacatcatccccctgcagggccctggcctcacaaccacagagtcccgccagcagcccatggccctggctgtggccctgaccaagggtggagaggcccgaggggagctgttctgggacgacggagagagcctggaagtgctggagcgaggggcctacacacaggtcatcttcctggccaggaataacacgatcgtgaatgagctggtacgtgtgaccagtgagggagctggcctgcagctgcagaaggtgactgtcctgggcgtggccacggcgccccagcaggtcctctccaacggtgtccctgtctccaacttcacctacagccccgacaccaaggtcctggacatctgtgtctcgctgttgatgggagagcagtttctcgtcagctggtgttgataactcgagccgggcggagtgtgttagtctctccagagggaggctggttccccagggaagcagagcctgtgtgcgggcagcagctgtgtgcgggcctgggggttgttaagtgcaattatttttaataaaaggggcatttggaaaaaaaaaaaaaaggtagcagtcgacagatgaattctgcagatctgtggcttctagctgcccgggtggcatccctgtgacccctccccagtgcctctcctggccctggaagttgccactccagtgcccaccagccttgtcctaataaaattaagttgcatcattttgtctgactaggtgtccttctataatattatggggtggaggggggtggtatggagcaaggggcaagttgggaagacaacctgtagggcctgcggggtctattgggaaccaagctggagtgcagtggcacaatcttggctcactgcaatctccgcctcctgggttcaagcgattctcctgcctcagcctcccgagttgttgggattccaggcatgcatgaccaggctcagctaatttttgtttttttggtagagacggggtttcaccatattggccaggctggtctccaactcctaatctcaggtgatctacccaccttggcctcccaaattgctgggattacaggcgtgaaccactgctcccttccctgtccttctgattttaaaaaaaagagaaatgttctggcacctgcacttgcactggggacagcctattttgctagtttgttttgtttcgttttgttttgatggagagcgtatgttgtttaaacgcggccgcgtagataagtagcatggcgggttaatcattaactacaaggaacccctagtgatggagttggccactccctctctgcgcgctcgctcgctcactgaggccgggcgaccaaaggtcgcccgacgcccgggctttgcccgggcggcctcagtgagcgagcgagcgcgcagttaattaaggcgccctaggccgacccttagactctgtactcagttctataaacgagccattggatacgagatccgtagattgataagggacacggaatatccccggacgcaatagacaccggtggacagcttggtatcctgagcacagtcgcgcgtccgaatctagctctactttagaggccccggattctgatggtcgtagaccgcagaaccgattggggggatgagatctactagttatcagcacacaattgcccattatacgcgcgtataatggactattgtgtgctgatatagggataacagggtaattctagagctagcatatggatccatcgatttgatgcggtattttctccttacgcatctgtgcggtatttcacaccgcatacgtcaaagcaaccatagtacgcgccctgtagcggcgcattaagcgcggcgggtgtggtggttacgcgcagcgtgaccgctacacttgccagcgccctagcgcccgctcctttcgctttcttcccttcctttctcgccacgttcgccggctttccccgtcaagctctaaatcgggggctccctttagggttccgatttagtgctttacggcacctcgaccccaaaaaacttgatttgggtgatggttcacgtagtgggccatcgccctgatagacggtttttcgccctttgacgttggagtccacgttctttaatagtggactcttgttccaaactggaacaacactcaactctatctcgggctattcttttgatttataagggattttgccgatttcggtctattggttaaaaaatgagctgatttaacaaaaatttaacgcgaattttaacaaaatattaacgtttacaattttatggtgcactctcagtacaatctgctctgatgccgcatagttaagccagccccgacacccgccaacacccgctgacgcgccctgacgggcttgtctgctcccggcatccgcttacagacaagctgtgaccgtctccgggagctgcatgtgtcagaggttttcaccgtcatcaccgaaacgcgcgagacgaaagggcctcgtgatacgcctatttttataggttaatgtcatgataataatggtttcttagacgtcaggtggcacttttcggggaaatgtgcgcggaacccctatttgtttatttttctaaatacattcaaatatgtatccgctcatgagacaataaccctgataaatgcttcaataatattgaaaaaggaagagtatgagccatattcaacgggaaacgtcgaggccgcgattaaattccaacatggatgctgatttatatgggtataaatgggctcgcgataatgtcgggcaatcaggtgcgacaatctatcgcttgtatgggaagcccgatgcgccagagttgtttctgaaacatggcaaaggtagcgttgccaatgatgttacagatgagatggtcagactaaactggctgacggaatttatgcctcttccgaccatcaagcattttatccgtactcctgatgatgcatggttactcaccactgcgatccccggaaaaacagcattccaggtattagaagaatatcctgattcaggtgaaaatattgttgatgcgctggcagtgttcctgcgccggttgcattcgattcctgtttgtaattgtccttttaacagcgatcgcgtatttcgtctcgctcaggcgcaatcacgaatgaataacggtttggttgatgcgagtgattttgatgacgagcgtaatggctggcctgttgaacaagtctggaaagaaatgcataaacttttgccattctcaccggattcagtcgtcactcatggtgatttctcacttgataaccttatttttgacgaggggaaattaataggttgtattgatgttggacgagtcggaatcgcagaccgataccaggatcttgccatcctatggaactgcctcggtgagttttctccttcattacagaaacggctttttcaaaaatatggtattgataatcctgatatgaataaattgcagtttcatttgatgctcgatgagtttttctaagcgtataatggtctagagctagcatatggatccatcgattccattatacgcctgtcagaccaagtttactcatatatactttagattgatttaaaacttcatttttaatttaaaaggatctaggtgaagatcctttttgataatctcatgaccaaaatcccttaacgtgagttttcgttccactgagcgtcagaccccgtagaaaagatcaaaggatcttcttgagatcctttttttctgcgcgtaatctgctgcttgcaaacaaaaaaaccaccgctaccagcggtggtttgtttgccggatcaagagctaccaactctttttccgaaggtaactggcttcagcagagcgcagataccaaatactgttcttctagtgtagccgtagttaggccaccacttcaagaactctgtagcaccgcctacatacctcgctctgctaatcctgttaccagtggctgctgccagtggcgataagtcgtgtcttaccgggttggactcaagacgatagttaccggataaggcgcagcggtcgggctgaacggggggttcgtgcacacagcccagcttggagcgaacgacctacaccgaactgagatacctacagcgtgagctatgagaaagcgccacgcttcccgaagggagaaaggcggacaggtatccggtaagcggcagggtcggaacaggagagcgcacgagggagcttccagggggaaacgcctggtatctttatagtcctgtcgggtttcgccacctctgacttgagcgtcgatttttgtgatgctcgtcaggggggcggagcctatggaaaaacgccagcaacgcggcctttttacggttcctggccttttgctggccttttgctcacatgt

SEQ ID NO: 37 - DNA, 8058 bp, synthetic construct
  source 1..8058: mol_type = other DNA
tctagagctagcatatggatccatcgatttagggataacagggtaattatcagcacacaattgcccattatacgcgcgtataatggactattgtgtgctgatatctgtacacttaagggctagatcttagcttacgtcactagagggtccacgtttagtttttaagatccattgatctcctaaacgctgcaagattcgcaacctggtatacttagcctaggcgctaggtcctagtgcagcgggactttttttctaaagtcgttgagaggaggagtcgtcagaccagatagctttgatgtcctgatcggaaggatcgttggcccccctgcaggcagctgttaattaactgcgcgctcgctcgctcactgaggccgcccgggcaaagcccgggcgtcgggcgacctttggtcgcccggcctcagtgagcgagcgagcgcgcagagagggagtggccaactccatcactaggggttccttgtagttaatgattaacccgccatgctacttatctacggcgcgccacgcgttctaggagttaatttttaaaaagcagtcaaaagtccaagtgcccttgcgagcatttactctctctgtttgctctggttaataatctcaggagcacaaacattccttactagttctaggagttaatttttaaaaagcagtcaaaagtccaagtgcccttgcgagcatttactctctctgtttgctctggttaataatctcaggagcacaaacattccttactagttctagagcggccgccagtgtgctggaattcggcttttttagggctggaagctacctttgacatcatttcctctgcgaatgcatgtataatttctacagaacctattagaaaggatcacccagcctctgcttttgtacaactttcccttaaaaaactgccaatcccactgctgtttggcccaatagtgagaactttttcctgctgcctcttggtgcttttgcctatggcccctattctgcctgctgaagacactcttgccagcatggacttaaacccctccagctctgacaatcctctttctcttttgttttacatgaagggtctggcagccaaagcaatcactcaaagttcaaaccttatcattttttgctttgttcctcttggccttggttttgtacatcagctttgaaaataccatcccagggttaatgctggggttaatttataactgagagtgctctagttctgcaatacaggacatgctataaaaatggaaagatgttgctttctgagagatcagcttacatgtgctagcgtagccaaccatgggagtgaggcacccgccctgctcccaccggctcctggccgtctgcgccctcgtgtccttggcaaccgctgcactcctggggcacatcctactccatgatttcctgctggttccccgagagctgagtggctcctccccagtcctggaggagactcacccagctcaccagcagggagccagcagaccagggccccgggacgcccaggcacaccccggccgtcccagagcagtgcccacacagtgcgacgtcccccccaacagccgcttcgattgcgcccctgacaaggccatcacccaggaacagtgcgaggcccgcggctgctgctacatccctgcaaagcaggggctgcagggagcccagatggggcagccctggtgcttcttcccacccagctaccccagctacaagctggagaacctgagctcctctgaaatgggctacacggccaccctgacccgtaccacccccaccttcttccccaaggacatcctgaccctgcggctggacgtgatgatggagactgagaaccgcctccacttcacgatcaaagatccagctaacaggcgctacgaggtgcccttggagaccccgcgtgtccacagccgggcaccgtccccactctacagcgtggagttctccgaggagcccttcggggtgatcgtgcaccggcagctggacggccgcgtgctgctgaacacgacggtggcgcccctgttctttgcggaccagttccttcagctgtccacctcgctgccctcgcagtatatcacaggcctcgccgagcacctcagtcccctgatgctcagcaccagctggaccaggatcaccctgtggaaccgggaccttgcgcccacgcccggtgcgaacctctacgggtctcaccctttctacctggcgctggaggacggcgggtcggcacacggggtgttcctgctaaacagcaacgccatggacgtggtcctgcagccgagccctgcccttagctggaggtcgacaggtgggatcctggacgtctacatcttcctgggcccagagcccaagagcgtggtgcagcagtacctggacgtggtgggatacccgttcatgccgccatactggggcctgggcttccacctgtgccgctggggctactcctccaccgctatcacccgccaggtggtggagaacatgaccagggcccacttccccctggacgtccagtggaacgatctggactacatggactcccggagggacttcacgttcaacaaggatggcttccgggacttcccggccatggtgcaggagctgcaccagggcggccggcgctacatgatgatcgtggatcctgccatcagcagctcgggccctgccgggagctacaggccctacgacgagggtctgcggaggggggttttcatcaccaacgagaccggccagccgctgattgggaaggtgtggcccgggtccactgccttccccgacttcaccaaccccacagccctggcctggtgggaggacatggtggctgagttccatgaccaggtgcccttcgacggcatgtggattgacatgaacgagccttccaacttcatcagaggctctgaggacggctgccccaacaacgagctggagaacccaccctacgtgcctggggtggttggggggaccctccaggcggccaccatctgtgcctccagccaccagtttctctccacacactacaacctgcacaacctctacggcctgaccgaagccatcgcctcccacagggcgctggtgaaggctcgggggacacgcccatttgtgatctcccgctcgacctttgctggccacggccgatacgccggccactggacgggggacgtgtggagctcctgggagcagctcgcctcctccgtgccagaaatcctgcagtttaacctgctgggggtgcctctggtcggggccgacgtctgcggcttcctgggcaacacctcagaggagctgtgtgtgcgctggacccagctgggggccttctaccccttcatgcggaaccacaacagcctgctcagtctgccccaggagccgtacagcttcagcgagccggcccagcaggccatgaggaaggccctcaccctgcgctacgcactcctcccccacctctacacactgttccaccaggcccacgtcgcgggggagaccgtggcccggcccctcttcctggagttccccaaggactctagcacctggactgtggaccaccagctcctgtggggggaggccctgctcatcaccccagtgctccaggccgggaaggccgaagtgactggctacttccccttgggcacatggtacgacctgcagacggtgccaatagaggcccttggcagcctcccacccccacctgcagctccccgtgagccagccatccacagcgaggggcagtgggtgacgctgccggcccccctggacaccatcaacgtgcacctccgggctgggtacatcatccccctgcagggccctggcctcacaaccacagagtcccgccagcagcccatggccctggctgtggccctgaccaagggtggagaggcccgaggggagctgttctgggacgacggagagagcctggaagtgctggagcgaggggcctacacacaggtcatcttcctggccaggaataacacgatcgtgaatgagctggtacgtgtgaccagtgagggagctggcctgcagctgcagaaggtgactgtcctgggcgtggccacggcgccccagcaggtcctctccaacggtgtccctgtctccaacttcacctacagccccgacaccaaggtcctggacatctgtgtctcgctgttgatgggagagcagtttctcgtcagctggtgttgataactcgagccgggcggagtgtgttagtctctccagagggaggctggttccccagggaagcagagcctgtgtgcgggcagcagctgtgtgcgggcctgggggttgttaagtgcaattatttttaataaaaggggcatttggaaaaaaaaaaaaaaggtagcagtcgacagatgaattctgcagatctgtggcttctagctgcccgggtggcatccctgtgacccctccccagtgcctctcctggccctggaagttgccactccagtgcccaccagccttgtcctaataaaattaagttgcatcattttgtctgactaggtgtccttctataatattatggggtggaggggggtggtatggagcaaggggcaagttgggaagacaacctgtagggcctgcggggtctattgggaaccaagctggagtgcagtggcacaatcttggctcactgcaatctccgcctcctgggttcaagcgattctcctgcctcagcctcccgagttgttgggattccaggcatgcatgaccaggctcagctaatttttgtttttttggtagagacggggtttcaccatattggccaggctggtctccaactcctaatctcaggtgatctacccaccttggcctcccaaattgctgggattacaggcgtgaaccactgctcccttccctgtccttctgattttaaaaaaaagagaaatgttctggcacctgcacttgcactggggacagcctattttgctagtttgttttgtttcgttttgttttgatggagagcgtatgttgtttaaacgcggccgcgtagataagtagcatggcgggttaatcattaactacaaggaacccctagtgatggagttggccactccctctctgcgcgctcgctcgctcactgaggccgggcgaccaaaggtcgcccgacgcccgggctttgcccgggcggcctcagtgagcgagcgagcgcgcagttaattaaggcgccctaggccgacccttagactctgtactcagttctataaacgagccattggatacgagatccgtagattgataagggacacggaatatccccggacgcaatagacaccggtggacagcttggtatcctgagcacagtcgcgcgtccgaatctagctctactttagaggccccggattctgatggtcgtagaccgcagaaccgattggggggatgagatctactagttatcagcacacaattgcccattatacgcgcgtataatggactattgtgtgctgatatagggataacagggtaattctagagctagcatatggatccatcgatttgatgcggtattttctccttacgcatctgtgcggtatttcacaccgcatacgtcaaagcaaccatagtacgcgccctgtagcggcgcattaagcgcggcgggtgtggtggttacgcgcagcgtgaccgctacacttgccagcgccctagcgcccgctcctttcgctttcttcccttcctttctcgccacgttcgccggctttccccgtcaagctctaaatcgggggctccctttagggttccgatttagtgctttacggcacctcgaccccaaaaaacttgatttgggtgatggttcacgtagtgggccatcgccctgatagacggtttttcgccctttgacgttggagtccacgttctttaatagtggactcttgttccaaactggaacaacactcaactctatctcgggctattcttttgatttataagggattttgccgatttcggtctattggttaaaaaatgagctgatttaacaaaaatttaacgcgaattttaacaaaatattaacgtttacaattttatggtgcactctcagtacaatctgctctgatgccgcatagttaagccagccccgacacccgccaacacccgctgacgcgccctgacgggcttgtctgctcccggcatccgcttacagacaagctgtgaccgtctccgggagctgcatgtgtcagaggttttcaccgtcatcaccgaaacgcgcgagacgaaagggcctcgtgatacgcctatttttataggttaatgtcatgataataatggtttcttagacgtcaggtggcacttttcggggaaatgtgcgcggaacccctatttgtttatttttctaaatacattcaaatatgtatccgctcatgagacaataaccctgataaatgcttcaataatattgaaaaaggaagagtatgagccatattcaacgggaaacgtcgaggccgcgattaaattccaacatggatgctgatttatatgggtataaatgggctcgcgataatgtcgggcaatcaggtgcgacaatctatcgcttgtatgggaagcccgatgcgccagagttgtttctgaaacatggcaaaggtagcgttgccaatgatgttacagatgagatggtcagactaaactggctgacggaatttatgcctcttccgaccatcaagcattttatccgtactcctgatgatgcatggttactcaccactgcgatccccggaaaaacagcattccaggtattagaagaatatcctgattcaggtgaaaatattgttgatgcgctggcagtgttcctgcgccggttgcattcgattcctgtttgtaattgtccttttaacagcgatcgcgtatttcgtctcgctcaggcgcaatcacgaatgaataacggtttggttgatgcgagtgattttgatgacgagcgtaatggctggcctgttgaacaagtctggaaagaaatgcataaacttttgccattctcaccggattcagtcgtcactcatggtgatttctcacttgataaccttatttttgacgaggggaaattaataggttgtattgatgttggacgagtcggaatcgcagaccgataccaggatcttgccatcctatggaactgcctcggtgagttttctccttcattacagaaacggctttttcaaaaatatggtattgataatcctgatatgaataaattgcagtttcatttgatgctcgatgagtttttctaagcgtataatggtctagagctagcatatggatccatcgattccattatacgcctgtcagaccaagtttactcatatatactttagattgatttaaaacttcatttttaatttaaaaggatctaggtgaagatcctttttgataatctcatgaccaaaatcccttaacgtgagttttcgttccactgagcgtcagaccccgtagaaaagatcaaaggatcttcttgagatcctttttttctgcgcgtaatctgctgcttgcaaacaaaaaaaccaccgctaccagcggtggtttgtttgccggatcaagagctaccaactctttttccgaaggtaactggcttcagcagagcgcagataccaaatactgttcttctagtgtagccgtagttaggccaccacttcaagaactctgtagcaccgcctacatacctcgctctgctaatcctgttaccagtggctgctgccagtggcgataagtcgtgtcttaccgggttggactcaagacgatagttaccggataaggcgcagcggtcgggctgaacggggggttcgtgcacacagcccagcttggagcgaacgacctacaccgaactgagatacctacagcgtgagctatgagaaagcgccacgcttcccgaagggagaaaggcggacaggtatccggtaagcggcagggtcggaacaggagagcgcacgagggagcttccagggggaaacgcctggtatctttatagtcctgtcgggtttcgccacctctgacttgagcgtcgatttttgtgatgctcgtcaggggggcggagcctatggaaaaacgccagcaacgcggcctttttacggttcctggccttttgctggccttttgctcacatgt

SEQ ID NO: 38 - DNA, 2691 bp, synthetic construct; identical to SEQ ID NO: 21
  source 1..2691: mol_type = other DNA

SEQ ID NO: 39 - DNA, 2769 bp, synthetic construct
  source 1..2769: mol_type = other DNA
atgggagtgaggcaccccccctgctcccatagactcctggctgtctgtgccctggtgtccttggcaacagctgcactccagcagggggccagcaggccaggccccagggatgcccaggcccaccctggcagacccagggctgtgcccacccagtgtgatgtgcctcccaacagcagatttgactgtgcccctgataaggccattactcaggaacagtgtgaggccaggggctgctgctatatccctgccaagcagggcctgcagggggcccagatggggcagccctggtgcttcttcccccccagctacccctcttataagctggagaatctgagcagctctgaaatgggctacactgccactctgaccaggactacccccaccttcttccccaaggatattctgactctgaggctggatgtgatgatggagactgagaacaggctgcacttcaccatcaaggaccctgccaacaggaggtatgaggtgcccctggaaactcccagggtgcactctagggcccccagccccctgtattctgtggagttctctgaggagccttttggggtcattgtccacaggcagctggatggcagggtgctgctgaatactactgtggcccctctgttctttgctgaccagttcctgcagctgagcaccagcctgccttctcagtacattactggcctggctgagcatctgagccccctgatgctgagcacctcttggaccagaatcaccctgtggaacagggacctggctcccactcctggggccaacctgtatggcagccaccccttctacctggccctggaggatgggggctctgcccatggggtgttcctgctgaacagcaatgccatggatgtggtgctgcagccctctcctgccctgtcttggagatctactgggggcatcctggatgtgtatatcttcctggggcctgagcccaagtctgtggtgcagcagtacctggatgtggtgggctaccccttcatgcccccctactggggcctgggcttccacctgtgcaggtggggctactcttctactgctatcaccaggcaggtggtggagaacatgaccagggctcacttccctctggatgtgcagtggaatgacctggactacatggactctaggagagacttcacttttaataaggatgggttcagggactttcctgccatggtgcaggagctgcatcaggggggcaggagatatatgatgattgtggaccctgctatttctagctctggccctgctggcagctataggccctatgatgaggggctgaggaggggggtgttcatcactaatgagactggccagcccctgattggcaaggtgtggcctggctctactgccttccctgatttcaccaaccccactgccctggcctggtgggaggatatggtggctgagtttcatgaccaggtgccctttgatggcatgtggattgacatgaatgagcccagcaactttatcaggggctctgaagatggctgccccaacaatgagctggagaaccccccctatgtgcctggggtggtggggggcaccctgcaggctgccaccatctgtgccagcagccaccagttcctgagcacccactataacctgcacaacctgtatggcctgactgaggccattgcctctcacagggccctggtgaaggctagggggactaggccctttgtgatcagcaggtctacttttgctggccatggcaggtatgctgggcactggactggggatgtgtggtctagctgggagcagctggccagctctgtgcctgagatcctgcagtttaatctgctgggggtgcccctggtgggggctgatgtgtgtggcttcctgggcaatacctctgaggagctgtgtgtgaggtggactcagctgggggctttctaccccttcatgagaaaccacaactctctgctgagcctgccccaggagccctattctttttctgagcctgcccagcaggctatgaggaaggccctgactctgaggtatgccctgctgccccacctgtataccctgttccatcaggcccatgtggctggggagactgtggccagacctctgttcctggagttccccaaggatagctctacttggactgtggaccaccagctgctgtggggggaggctctgctgatcacccctgtgctgcaggctgggaaggctgaggtgactggctatttccccctgggcacctggtatgatctgcagactgtgcccattgaggccctgggctctctgccccctccccctgctgcccccagggagcctgccatccactctgagggccagtgggtgaccctgcctgcccctctggacactatcaatgtgcacctgagggctggctacatcatccccctgcagggccctggcctgactaccactgagtctaggcagcagcccatggccctggctgtggctctgaccaaggggggggaggccaggggggagctgttctgggatgatggggagtctctggaggtgctggagaggggggcctacacccaggtgatcttcctggctaggaataacaccattgtcaatgagctggtgagggtgacctctgagggggctggcctgcagctgcagaaggtgactgtgctgggggtggctactgccccccagcaggtgctgagcaatggggtgcctgtgagcaacttcacctatagccctgacaccaaggtgctggacatctgtgtgagcctgctgatgggggagcagttcctggtgagctggtgctaa

SEQ ID NO: 40 - DNA, 43 bp, synthetic construct
  source 1..43: mol_type = other DNA
caggtggattcttgggcatttgcttaagcttggtaccgccacc

SEQ ID NO: 41 - DNA, 24 bp, synthetic construct
  source 1..24: mol_type = other DNA
caggtggattcttgggcatttgct

SEQ ID NO: 42 - DNA, 195 bp, synthetic construct
  source 1..195: mol_type = other DNA
atctgtggcttctagctgcccgggtggcatccctgtgacccctccccagtgcctctcctggccctggaagttgccactccagtgcccaccagccttgtcctaataaaattaagttgcatcattttgtctgactaggtgtccttctataatattatggggtggaggggggtggtatggagcaaggggcaagttggg

SEQ ID NO: 43 - DNA, 193 bp, synthetic construct
  source 1..193: mol_type = other DNA
ctgtggcttctagctgcccgggtggcatccctgtgacccctccccagtgcctctcctggccctggaagttgccactccagtgcccaccagccttgtcctaataaaattaagttgcatcattttgtctgactaggtgtccttctataatattatggggtggaggggggtggtatggagcaaggggcaagttggg

SEQ ID NO: 44 - DNA, 193 bp, synthetic construct; identical to SEQ ID NO: 43
  source 1..193: mol_type = other DNA

SEQ ID NO: 45 - DNA, 92 bp, synthetic construct
  source 1..92: mol_type = other DNA
agagaaatgttctggcacctgcacttgcactggggacagcctattttgctagtttgttttgtttcgttttgttttgatggagagcgtatgtt

SEQ ID NO: 46 - DNA, 611 bp, synthetic construct
  source 1..611: mol_type = other DNA
gtccttcaacgtcgaactgtagcactctggatagctagctagcgtttgtagatagtttcaaggatagcaaccaacaacacgatagtttagaaattgttctagatcttctgctactactcgagagatagttgacttctagaagactctggatagagagcttcctgtggtttctatttcaacacttcgagcgatttagatagaggcgtcaattgagaacaaaaactggacacctgtttctagaacactagtgctagtcttctcaaggcttgatacgtcctgccactcacacacaaaaaaccaacacacagattaatgaaaataaagatcttttattagagagcgagtggatagtttagagtcgcttgagacttatcctgtgtccaactagccaagagtagagagagagtgactaggtggatcgagagatcgtcgtctatttgactgctagcctgtgttctcgtcgtagtccaaatcttcaatactctggcgactagtaacttgaatctgtgtatctaacacgacaaggctactcctttgagtttctagtgataagtgcgactggatctagctagttgagtttctagaaactacgtccaaagctactagcacta

SEQ ID NO: 47 - DNA, 48 bp, synthetic construct
  source 1..48: mol_type = other DNA
cacacaaaaaaccaacacacagattaatgaaaataaagatcttttatt

SEQ ID NO: 48 - DNA, 98 bp, synthetic construct
  source 1..98: mol_type = other DNA
agccgggcggagtgtgttagtctctccagagggaggctggttccccagggaagcagagcctgtgtgcgggcagcagctgtgtgcgggcctgggggttg

SEQ ID NO: 49 - DNA, 96 bp, synthetic construct
  source 1..96: mol_type = other DNA
ccgggcggagtgtgttagtctctccagagggaggctggttccccagggaagcagagcctgtgtgcgggcagcagctgtgtgcgggcctgggggttg

SEQ ID NO: 50 - DNA, 165 bp, synthetic construct
  source 1..165: mol_type = other DNA
ccgggcggagtgtgttagtctctccagagggaggctggttccccagggaagcagagcctgtgtgcgggcagcagctgtgtgcgggcctgggggttgttaagtgcaattatttttaataaaaggggcatttggaaaaaaaaaaaaaaggtagcagtcgacagatga

SEQ ID NO: 51 - DNA, 78 bp, synthetic construct
  source 1..78: mol_type = other DNA
atgggagtgaggcaccccccctgctcccatagactcctggctgtctgtgccctggtgtccttggcaacagctgcactc

SEQ ID NO: 52 - DNA, 168 bp, synthetic construct
  source 1..168: mol_type = other DNA
atgggagtgaggcaccccccctgctcccatagactcctggctgtctgtgccctggtgtccttggcaacagctgcactcctggggcacatcctactccatgatttcctgctggttcccagagagctgagtggctcctccccagtcctggaggagactcacccagctcac

SEQ ID NO: 53 - DNA, 81 bp, synthetic construct
  source 1..81: mol_type = other DNA
atgggggtgaggcaccctccctgttctcacaggctgctggctgtgtgtgctctggtgtctctggccactgctgccctgctg

SEQ ID NO: 54 - DNA, 60 bp, synthetic construct
  source 1..60: mol_type = other DNA
atggagttcgggctgagctgggtctttctggtggccctgctgaagggagtccagtgcgag

SEQ ID NO: 55 - DNA, 60 bp, synthetic construct
  source 1..60: mol_type = other DNA
atgtaccgtatgcagctgctgtcctgcatcgcactgtcactggcactggttaccaactca

SEQ ID NO: 56 - DNA, 60 bp, synthetic construct
  source 1..60: mol_type = other DNA
atgtaccgtatgcagctgctgctgctgatcgcactgtcactggcactggttaccaactca

SEQ ID NO: 57 - DNA, 69 bp, synthetic construct
  source 1..69: mol_type = other DNA
atggggaagaacaaactccttcatccaagtctggttcttctcctcttggtcctcctgcccacagatgcc

SEQ ID NO: 58 - DNA, 75 bp, synthetic construct
  source 1..75: mol_type = other DNA
atgagaaaagacagacttcttcatttatgtcttgtgctacttcttatcctgctttctgccagtgactcaaactct

SEQ ID NO: 59 - protein, 27 aa, synthetic construct
MGVRHPPCSHRLLAVCALVSLATAALL

SEQ ID NO: 60 - protein, 20 aa, synthetic construct
MEFGLSWVFLVALLKGVQCE

SEQ ID NO: 61 - protein, 20 aa, synthetic construct
MYRMQLLSCIALSLALVTNS

SEQ ID NO: 62 - protein, 20 aa, synthetic construct
MYRMQLLLLIALSLALVTNS

SEQ ID NO: 63 - protein, 23 aa, synthetic construct
MGKNKLLHPSLVLLLLVLLPTDA

SEQ ID NO: 64 - protein, 25 aa, synthetic construct
MRKDRLLHLCLVLLLILLSASDSNS

SEQ ID NO: 65 - protein, 21 aa, synthetic construct
MWWRLWWLLLLLLLLWPMVWA

SEQ ID NO: 66 - protein, 11 aa, synthetic construct
LLLLAVLCLGT

SEQ ID NO: 67 - DNA, 72 bp, Homo sapiens
  source 1..72: mol_type = genomic DNA
atgccgtcttctgtctcgtggggcatcctcctgctggcaggcctgtgctgcctggtccctgtctccctggct

SEQ ID NO: 68 - protein, 32 aa, Rattus norvegicus
MLRGPGPGRLLLLAVLCLGTSVRCTETGKSKR

SEQ ID NO: 69 - protein, 38 aa, Rattus norvegicus
MLRGPGPGRLLLLAVLCLGTSVRCTETGKSKRLALQIV

SEQ ID NO: 70 - protein, 26 aa, Homo sapiens
MLRGPGPGLLLLAVQCLGTAVPSTGA

SEQ ID NO: 71 - protein, 31 aa, Xenopus laevis
MRRGALTGLLLVLCLSVVLRAAPSATSKKRR

SEQ ID NO: 72 - DNA, 72 bp, Homo sapiens
  source 1..72: mol_type = genomic DNA
atgggaatcccaatggggaagtcgatgctggtgcttctcaccttcttggccttcgcctcgtgctgcattgct

SEQ ID NO: 73 - DNA, 96 bp, Rattus norvegicus
  source 1..96: mol_type = genomic DNA
atgctcaggggtccgggacccgggcggctgctgctgctagcagtcctgtgcctggggacatcggtgcgctgcaccgaaaccgggaagagcaagagg

SEQ ID NO: 74 - DNA, 114 bp, Rattus norvegicus
  source 1..114: mol_type = genomic DNA
atgctcaggggtccgggacccgggcggctgctgctgctagcagtcctgtgcctggggacatcggtgcgctgcaccgaaaccgggaagagcaagaggcaggctcagcaaatcgtg

SEQ ID NO: 75 - DNA, 78 bp, Homo sapiens
  source 1..78: mol_type = genomic DNA
atgcttaggggtccggggcccgggctgctgctgctggccgtccagtgcctggggacagcggtgccctccacgggagcc

SEQ ID NO: 76 - DNA, 93 bp, Xenopus laevis
  source 1..93: mol_type = genomic DNA
atgcgccggggggccctgaccgggctgctcctggtcctgtgcctgagtgttgtgctacgtgcagccccctctgcaacaagcaagaagcgcagg

SEQ ID NO: 77 - protein, 17 aa, Rattus norvegicus
MTPLLLLAVLCLGTALA

SEQ ID NO: 78 - protein, 22 aa, Homo sapiens
MLSFVDTRTLLLLAVTLCLATC

SEQ ID NO: 79 - DNA, 130 bp, synthetic construct
  source 1..130: mol_type = other DNA
ctgcgcgctcgctcgctcactgaggccgcccgggcaaagcccgggcgtcgggcgacctttggtcgcccggcctcagtgagcgagcgagcgcgcagagagggagtggccaactccatcactaggggttcct

SEQ ID NO: 80 - DNA, 130 bp, synthetic construct
  source 1..130: mol_type = other DNA
aggaacccctagtgatggagttggccactccctctctgcgcgctcgctcgctcactgaggccgggcgaccaaaggtcgcccgacgcccgggctttgcccgggcggcctcagtgagcgagcgagcgcgcag

SEQ ID NO: 81 - DNA, 124 bp, synthetic construct
  source 1..124: mol_type = other DNA
ctgcgcgctcgctcgctcactgaggccgcccgggcaaagcccgggcgtcgggcgacctttggtcgcccggcctcagtgagcgagcgagcgcgcagagagggagtggccaactccatcactaggg

SEQ ID NO: 82 - DNA, 130 bp, synthetic construct; identical to SEQ ID NO: 80
  source 1..130: mol_type = other DNA

SEQ ID NO: 83 - DNA, 167 bp, synthetic construct
  source 1..167: mol_type = other DNA
aggaacccctagtgatggagttggccactccctctctgcgcgctcgctcgctcactgaggcaatttgataaaaatcgtcaaattataaacaggctttgcctgtttagcctcagtgagcgagcgagcgcgcagagagggagtggccaactccatcactaggggttcct

SEQ ID NO: 84 - DNA, 143 bp, synthetic construct
  source 1..143: mol_type = other DNA
aggaacccctagtgatggagttggccactccctctctgcgcgctcgctcgctcactgagggataaaaatccaggctttgcctgcctcagtgagcgagcgagcgcgcagagagggagtggccaactccatcactaggggttcct

SEQ ID NO: 85 - DNA, 143 bp, synthetic construct; identical to SEQ ID NO: 84
  source 1..143: mol_type = other DNA

SEQ ID NO: 86 - DNA, 208 bp, synthetic construct
  source 1..208: mol_type = other DNA
aggaacccctagtgatggagttggccactccctctctgggattgggattgcgcgctcgctcgcgggattgggattgggattgggattgggattgggattgataaaaatcaatcccaatcccaatcccaatcccaatcccaatcccgcgagcgagcgcgcaatcccaatcccagagagggagtggccaactccatcactaggggttcct

SEQ ID NO: 87 - DNA, 402 bp, synthetic construct
  source 1..402: mol_type = other DNA
caggctttcactttctcgccaacttacaaggcctttctgtgtaaacaatacctgaacctttaccccgttgcccggcaacggccaggtctgtgccaagtgtttgaggttaatttttaaaaagcagtcaaaagtccaagtggcccttggcagcatttactctctctgtttgctctggttaataatctcaggagcacaaacattccggcccgggaggcgccctttggaccttttgcaatcctggcgcactgaacccttgacccctgccctgcagcccccgcagcttgctgtttgcccactctatttgcccagccccagccctggagagtcctttagcagggcaaagtgcaacataggcagaccttaagggatgactcagtaacagataagctttgtgtgcctgca

SEQ ID NO: 88 - DNA, 305 bp, synthetic construct
  source 1..305: mol_type = other DNA
aggttaatttttaaaaagcagtcaaaagtccaagtggcccttggcagcatttactctctctgtttgctctggttaataatctcaggagcacaaacattcctgtaccggcccgggaggcgccctttggaccttttgcaatcctggcgcactgaacccttgacccctgccctgcagcccccgcagcttgctgtttgcccactctatttgcccagccccagccctggagagtcctttagcagggcaaagtgcaacataggcagaccttaagggatgactcagtaacagataagctttgtgtgcctgca

SEQ ID NO: 89 - DNA, 103 bp, synthetic construct
  source 1..103: mol_type = other DNA
caggctttcactttctcgccaacttacaaggcctttctgtgtaaacaatacctgaacctttaccccgttgcccggcaacggccaggtctgtgccaagtgtttg

SEQ ID NO: 90 - DNA, 212 bp, synthetic construct
  source 1..212: mol_type = other DNA
aggttaatttttaaaaagcagtcaaaagtccaagtggcccttggcagcatttactctctctgtttgctctggttaataatctcaggagcacaaacattccggcccgggaggcgccctttggaccttttgcaatcctggcgcactgaacccttgacccctgccctgcagcccccgcagcttgctgtttgcccactctatttgcccagccccag

SEQ ID NO: 91 - DNA, 283 bp, synthetic construct
  source 1..283: mol_type = other DNA
aggttaatttttaaaaagcagtcaaaagtccaagtggcccttggcagcatttactctctctgtttgctctggttaataatctcaggagcacaaacattccccctgttcaaacatgtcctaatactctgtctctgcaagggtcatcagtagttttccatcttactcaacatcctcccagtgagtcatatgtttgctcactgaaggttactagttaacaggcatcccttaaacaggatataaaaggacttcagcaggactgctcgaaacatcccactcagccacc

SEQ ID NO: 92 - DNA, 565 bp, synthetic construct
  source 1..565: mol_type = other DNA
aggttaatttttaaaaagcagtcaaaagtccaagtggcccttggcagcatttactctctctgtttgctctggttaataatctcaggagcacaaacattccccctgttcaaacatgtcctaatactctgtctctgcaagggtcatcagtagttttccatcttactcaacatcctcccagtgagtcatatgtttgctcactgaaggttactagttaacaggcatcccttaaacaggatataaaaggacttcagcaggactgctcgaaacatcccacttcagatcgcctggagacgccatccacgctgttttgacctccatagaagacaccgggaccgatccagcctccgcggccgggaacggtgcattggaacgcggattccccgtgccaagagtgacgtaagtaccgcctatagactctataggcacacccctttggctcttatgcatgaacggtggagggcagtgtagtctgagcagtactcgttgctgccgcgcgcgccaccagacataatagctgacagactaacagactgttcctttccatgggtcttttctgcaggccacc

SEQ ID NO: 93 - DNA, 478 bp, synthetic construct
  source 1..478: mol_type = other DNA
caggctttcactttctcgccaacttacaaggcctttctgtgtaaacaatacctgaacctttaccccgttgcccggcaacggccaggtctgtgccaagtgtttgaggttaatttttaaaaagcagtcaaaagtccaagtggcccttggcagcatttactctctctgtttgctctggttaataatctcaggagcacaaacattccggcccgggaggcgccctttggaccttttgcaatcctggcgcactgaacccttgacccctgccctgcagcccccgcagcttgctgtttgcccactctatttgcccagccccagccctggagagtcctttagcagggcaaagtgcaacataggcagaccttaagggatgactcagtaacagataagctttgtgtgcctgcagggcatataaaacaggggcaaggcacagactcatagcagagcaatcaccaccaagcctggaataactgcagccacc

SEQ ID NO: 94 - DNA, 381 bp, synthetic construct
  source 1..381: mol_type = other DNA
aggttaatttttaaaaagcagtcaaaagtccaagtggcccttggcagcatttactctctctgtttgctctggttaataatctcaggagcacaaacattcctgtaccggcccgggaggcgccctttggaccttttgcaatcctggcgcactgaacccttgacccctgccctgcagcccccgcagcttgctgtttgcccactctatttgcccagccccagccctggagagtcctttagcagggcaaagtgcaacataggcagaccttaagggatgactcagtaacagataagctttgtgtgcctgcagggcatataaaacaggggcaaggcacagactcatagcagagcaatcaccaccaagcctggaataactgcagccacc

SEQ ID NO: 95 - DNA, 379 bp, synthetic construct
  source 1..379: mol_type = other DNA
caggctttcactttctcgccaacttacaaggcctttctgtgtaaacaatacctgaacctttaccccgttgcccggcaacggccaggtctgtgccaagtgtttgccgatgacctaatgattctgagcttggcaaaggtcttatctcccagctcgcccaggcccagtgttccaggaatgtgacctttgctgcagcagccgctggagggggcagaggggatgggctggaggttgagcaaacagagcagcagaaaaggcagttcctcttctccagtgccctccttccctgtctctgcctctccctcccttcctcaggcatcagagcggagacttcagggagaccagagcccagcttgccaggcactgagctagaagccctgcc

SEQ ID NO: 96 - DNA, 288 bp, synthetic construct
  source 1..288: mol_type = other DNA
aggttaatttttaaaaagcagtcaaaagtccaagtggcccttggcagcatttactctctctgtttgctctggttaataatctcaggagcacaaacattccggcccgggaggcgccctttggaccttttgcaatcctggcgcactgaacccttgacccctgccctgcagcccccgcagcttgctgtttgcccactctatttgcccagccccaggggcatataaaacaggggcaaggcacagactcatagcagagcaatcaccaccaagcctggaataactgcagccacc

SEQ ID NO: 97 - DNA, 741 bp, synthetic construct
  source 1..741: mol_type = other DNA
tctaggagttaatttttaaaaagcagtcaaaagtccaagtgcccttgcgagcatttactctctctgtttgctctggttaataatctcaggagcacaaacattccttactagttctaggagttaatttttaaaaagcagtcaaaagtccaagtgcccttgcgagcatttactctctctgtttgctctggttaataatctcaggagcacaaacattccttactagttctagagcggccgccagtgtgctggaattcggcttttttagggctggaagctacctttgacatcatttcctctgcgaatgcatgtataatttctacagaacctattagaaaggatcacccagcctctgcttttgtacaactttcccttaaaaaactgccaatcccactgctgtttggcccaatagtgagaactttttcctgctgcctcttggtgcttttgcctatggcccctattctgcctgctgaagacactcttgccagcatggacttaaacccctccagctctgacaatcctctttctcttttgttttacatgaagggtctggcagccaaagcaatcactcaaagttcaaaccttatcattttttgctttgttcctcttggccttggttttgtacatcagctttgaaaataccatcccagggttaatgctggggttaatttataactgagagtgctctagttctgcaatacaggacatgctataaaaatggaaagatgttgctttctgagagat

SEQ ID NO: 98 - DNA, 757 bp, synthetic construct
  source 1..757: mol_type = other DNA
tctaggagttaatttttaaaaagcagtcaaaagtccaagtgcccttgcgagcatttactctctctgtttgctctggttaataatctcaggagcacaaacattccttactagttctaggagttaatttttaaaaagcagtcaaaagtccaagtgcccttgcgagcatttactctctctgtttgctctggttaataatctcaggagcacaaacattccttactagttctagagcggccgccagtgtgctggaattcggcttttttagggctggaagctacctttgacatcatttcctctgcgaatgcatgtataatttctacagaacctattagaaaggatcacccagcctctgcttttgtacaactttcccttaaaaaactgccaatcccactgctgtttggcccaatagtgagaactttttcctgctgcctcttggtgcttttgcctatggcccctattctgcctgctgaagacactcttgccagcatggacttaaacccctccagctctgacaatcctctttctcttttgttttacatgaagggtctggcagccaaagcaatcactcaaagttcaaaccttatcattttttgctttgttcctcttggccttggttttgtacatcagctgtgaaaataccatcccagggtatttatagctggggttaatttataactgagagtgctctagttctgcaatacaggacatgctataaaaatggaaagatgttgctttctgagagatcagcttacatgtg

SEQ ID NO: 99 - DNA, 754 bp, synthetic construct
  source 1..754: mol_type = other DNA
tctaggagttaatttttaaaaagcagtcaaaagtccaagtgcccttgcgagcatttactctctctgtttgctctggttaataatctcaggagcacaaacattccttactagttctaggagttaatttttaaaaagcagtcaaaagtccaagtgcccttgcgagcatttactctctctgtttgctctggttaataatctcaggagcacaaacattccttactagttctagagcggccgccagtgtgctggaattcggcttttttagggctggaagctacctttgacatcatttcctctgcgaatgcatgtataatttctacagaacctattagaaaggatcacccagcctctgcttttgtacaactttcccttaaaaaactgccaatcccactgctgtttggcccaatagtgagaactttttcctgctgcctcttggtgcttttgcctatggcccctattctgcctgctgaagacactcttgccagcatggacttaaacccctccagctctgacaatcctctttctcttttgttttacatgaagggtctggcagccaaagcaatcactcaaagttcaaaccttatcattttttgctttgttcctcttggccttggttttgtacatcagctttgaaaataccatcccagggttaatgctggggttaatttataactgagagtgctctagttctgcaatacaggacatgctataaaaatggaaagatgttgctttctgagagatcagcttacatgtg

SEQ ID NO: 100 - DNA, 208 bp, synthetic construct; identical to SEQ ID NO: 86
  source 1..208: mol_type = other DNA

SEQ ID NO: 101 - DNA, 199 bp, synthetic construct
  source 1..199: mol_type = other DNA
aggaacccctagtgatggagttggccactccctctctgcgcgctcgctcgctcgggattgggattgggattgggattgggattgggattgataaaaatcaatcccaatcccaatcccaatcccaatcccaatcccgcgagcgagcgcgcaggagagggagtggccaactccatcactaggggttcctaagcttattata

SEQ ID NO: 102 - DNA, 154 bp, synthetic construct
  source 1..154: mol_type = other DNA
aggaacccctagtgatggagttggccactccctctctgcgcgctcgctcgctcactgagggcgcctataaagataaaaatccaggctttgcctgcctcagttagcgagcgagcgcgcagagagggagtggccaactccatcactaggggttcct

SEQ ID NO: 103 - DNA, 127 bp, synthetic construct
  source 1..127: mol_type = other DNA
ctagtgatggagttggccactccctctctgcgcgctcgctcgctcactgagggataaaaatccaggctttgcctgcctcagtgagcgagcgagcgcgcagagagggagtggccaactccatcactag

SEQ ID NO: 104 - DNA, 145 bp, synthetic construct
  source 1..145: mol_type = other DNA
ttggccactccctctctgcgcgctcgctcgctcactgaggccgggcgaccaaaggtcgcccgacgcccgggctttgcccgggcggcctcagtgagcgagcgagcgcgcagagagggagtggccaactccatcactaggggttcct

SEQ ID NO: 105 - DNA, 145 bp, synthetic construct
  source 1..145: mol_type = other DNA
aggaacccctagtgatggagttggccactccctctctgcgcgctcgctcgctcactgaggccgggcgaccaaaggtcgcccgacgcccgggctttgcccgggcggcctcagtgagcgagcgagcgcgcagagagggagtggccaa

SEQ ID NO: 106 - protein, 952 aa, synthetic construct; identical to SEQ ID NO: 1

SEQ ID NO: 107 - protein, 952 aa, synthetic construct
MGVRHPPCSHRLLAVCALVSLATAALLGHILLHDFLLVPRELSGSSPVLEETHPAHQQGASRPGPRDAQAHPGRPRAVPTQCDVPPNSRFDCAPDKAITQEQCEARGCCYIPAKQGLQGAQMGQPWCFFPPSYPSYKLENLSSSEMGYTATLTRTTPTFFPKDILTLRLDVMMETENRLHFTIKDPANRRYEVPLETPRVLSRAPSPLYSVEFSEEPFGVIVHRQLDGRVLLNTTVAPLFFADQFLQLSTSLPSQYITGLAEHLSPLMLSTSWTRITLWNRDLAPTPGANLYGSHPFYLALEDGGSAHGVFLLNSNAMDVVLQPSPALSWRSTGGILDVYIFLGPEPKSVVQQYLDVVGYPFMPPYWGLGFHLCRWGYSSTAITRQVVENMTRAHFPLDVQWNDLDYMDSRRDFTFNKDGFRDFPAMVQELHQGGRRYMMIVDPAISSSGPAGSYRPYDEGLRRGVFITNETGQPLIGKVWPGSTAFPDFTNPTALAWWEDMVAEFHDQVPFDGMWIDMNEPSNFIRGSEDGCPNNELENPPYVPGVVGGTLQAATICASSHQFLSTHYNLHNLYGLTEAIASHRALVKARGTRPFVISRSTFAGHGRYAGHWTGDVWSSWEQLASSVPEILQFNLLGVPLVGADVCGFLGNTSEELCVRWTQLGAFYPFMRNHNSLLSLPQEPYSFSEPAQQAMRKALTLRYALLPHLYTLFHQAHVAGETVARPLFLEFPKDSSTWTVDHQLLWGEALLITPVLQAGKAEVTGYFPLGTWYDLQTVPIEALGSLPPPPAAPREPAIHSEGQWVTLPAPLDTINVHLRAGYIIPLQGPGLTTTESRQQPMALAVALTKGGEARGELFWDDGESLEVLERGAYTQVIFLARNNTIVNELVRVTSEGAGLQLQKVTVLGVATAPQQVLSNGVPVSNFTYSPDTKVLDICVSLLMGEQFLVSWC

SEQ ID NO: 108 - protein, 945 aa, synthetic construct
MEFGLSWVFLVALLKGVQCEGHILLHDFLLVPRELSGSSPVLEETHPAHQQGASRPGPRDAQAHPGRPRAVPTQCDVPPNSRFDCAPDKAITQEQCEARGCCYIPAKQGLQGAQMGQPWCFFPPSYPSYKLENLSSSEMGYTATLTRTTPTFFPKDILTLRLDVMMETENRLHFTIKDPANRRYEVPLETPRVHSRAPSPLYSVEFSEEPFGVIVHRQLDGRVLLNTTVAPLFFADQFLQLSTSLPSQYITGLAEHLSPLMLSTSWTRITLWNRDLAPTPGANLYGSHPFYLALEDGGSAHGVFLLNSNAMDVVLQPSPALSWRSTGGILDVYIFLGPEPKSVVQQYLDVVGYPFMPPYWGLGFHLCRWGYSSTAITRQVVENMTRAHFPLDVQWNDLDYMDSRRDFTFNKDGFRDFPAMVQELHQGGRRYMMIVDPAISSSGPAGSYRPYDEGLRRGVFITNETGQPLIGKVWPGSTAFPDFTNPTALAWWEDMVAEFHDQVPFDGMWIDMNEPSNFIRGSEDGCPNNELENPPYVPGVVGGTLQAATICASSHQFLSTHYNLHNLYGLTEAIASHRALVKARGTRPFVISRSTFAGHGRYAGHWTGDVWSSWEQLASSVPEILQFNLLGVPLVGADVCGFLGNTSEELCVRWTQLGAFYPFMRNHNSLLSLPQEPYSFSEPAQQAMRKALTLRYALLPHLYTLFHQAHVAGETVARPLFLEFPKDSSTWTVDHQLLWGEALLITPVLQAGKAEVTGYFPLGTWYDLQTVPIEALGSLPPPPAAPREPAIHSEGQWVTLPAPLDTINVHLRAGYIIPLQGPGLTTTESRQQPMALAVALTKGGEARGELFWDDGESLEVLERGAYTQVIFLARNNTIVNELVRVTSEGAGLQLQKVTVLGVATAPQQVLSNGVPVSNFTYSPDTKVLDICVSLLMGEQFLVSWC

SEQ ID NO: 109 - protein, 945 aa, synthetic construct
MYRMQLLSCIALSLALVTNSGHILLHDFLLVPRELSGSSPVLEETHPAHQQGASRPGPRDAQAHPGRPRAVPTQCDVPPNSRFDCAPDKAITQEQCEARGCCYIPAKQGLQGAQMGQPWCFFPPSYPSYKLENLSSSEMGYTATLTRTTPTFFPKDILTLRLDVMMETENRLHFTIKDPANRRYEVPLETPRVHSRAPSPLYSVEFSEEPFGVIVHRQLDGRVLLNTTVAPLFFADQFLQLSTSLPSQYITGLAEHLSPLMLSTSWTRITLWNRDLAPTPGANLYGSHPFYLALEDGGSAHGVFLLNSNAMDVVLQPSPALSWRSTGGILDVYIFLGPEPKSVVQQYLDVVGYPFMPPYWGLGFHLCRWGYSSTAITRQVVENMTRAHFPLDVQWNDLDYMDSRRDFTFNKDGFRDFPAMVQELHQGGRRYMMIVDPAISSSGPAGSYRPYDEGLRRGVFITNETGQPLIGKVWPGSTAFPDFTNPTALAWWEDMVAEFHDQVPFDGMWIDMNEPSNFIRGSEDGCPNNELENPPYVPGVVGGTLQAATICASSHQFLSTHYNLHNLYGLTEAIASHRALVKARGTRPFVISRSTFAGHGRYAGHWTGDVWSSWEQLASSVPEILQFNLLGVPLVGADVCGFLGNTSEELCVRWTQLGAFYPFMRNHNSLLSLPQEPYSFSEPAQQAMRKALTLRYALLPHLYTLFHQAHVAGETVARPLFLEFPKDSSTWTVDHQLLWGEALLITPVLQAGKAEVTGYFPLGTWYDLQTVPIEALGSLPPPPAAPREPAIHSEGQWVTLPAPLDTINVHLRAGYIIPLQGPGLTTTESRQQPMALAVALTKGGEARGELFWDDGESLEVLERGAYTQVIFLARNNTIVNELVRVTSEGAGLQLQKVTVLGVATAPQQVLSNGVPVSNFTYSPDTKVLDICVSLLMGEQFLVSWC

SEQ ID NO: 110 - protein, 945 aa, synthetic construct
MYRMQLLLLIALSLALVTNSGHILLHDFLLVPRELSGSSPVLEETHPAHQQGASRPGPRDAQAHPGRPRAVPTQCDVPPNSRFDCAPDKAITQEQCEARGCCYIPAKQGLQGAQMGQPWCFFPPSYPSYKLENLSSSEMGYTATLTRTTPTFFPKDILTLRLDVMMETENRLHFTIKDPANRRYEVPLETPRVHSRAPSPLYSVEFSEEPFGVIVHRQLDGRVLLNTTVAPLFFADQFLQLSTSLPSQYITGLAEHLSPLMLSTSWTRITLWNRDLAPTPGANLYGSHPFYLALEDGGSAHGVFLLNSNAMDVVLQPSPALSWRSTGGILDVYIFLGPEPKSVVQQYLDVVGYPFMPPYWGLGFHLCRWGYSSTAITRQVVENMTRAHFPLDVQWNDLDYMDSRRDFTFNKDGFRDFPAMVQELHQGGRRYMMIVDPAISSSGPAGSYRPYDEGLRRGVFITNETGQPLIGKVWPGSTAFPDFTNPTALAWWEDMVAEFHDQVPFDGMWIDMNEPSNFIRGSEDGCPNNELENPPYVPGVVGGTLQAATICASSHQFLSTHYNLHNLYGLTEAIASHRALVKARGTRPFVISRSTFAGHGRYAGHWTGDVWSSWEQLASSVPEILQFNLLGVPLVGADVCGFLGNTSEELCVRWTQLGAFYPFMRNHNSLLSLPQEPYSFSEPAQQAMRKALTLRYALLPHLYTLFHQAHVAGETVARPLFLEFPKDSSTWTVDHQLLWGEALLITPVLQAGKAEVTGYFPLGTWYDLQTVPIEALGSLPPPPAAPREPAIHSEGQWVTLPAPLDTINVHLRAGYIIPLQGPGLTTTESRQQPMALAVALTKGGEARGELFWDDGESLEVLERGAYTQVIFLARNNTIVNELVRVTSEGAGLQLQKVTVLGVATAPQQVLSNGVPVSNFTYSPDTKVLDICVSLLMGEQFLVSWC

SEQ ID NO: 111 - DNA, 2868 bp, synthetic construct
  source 1..2868: mol_type = other DNA
atgggagtgaggcacccgccctgctcccaccggctcctggccgtctgcgccctcgtgtccttggcaaccgctgcactcctggggcacatcctactccatgatttcctgctggttccccgagagctgagtggctcctccccagtcctggaggagactcacccagctcaccagcagggagccagcagaccagggccccgggacgcccaggcacaccccggccgtcccagagcagtgcccacacagtgcgacgtcccccccaacagccgcttcgattgcgcccctgacaaggccatcacccaggaacagtgcgaggcccgcggctgctgctacatccctgcaaagcaggggctgcagggagcccagatggggcagccctggtgcttcttcccacccagctaccccagctacaagctggagaacctgagctcctctgaaatgggctacacggccaccctgacccgtaccacccccaccttcttccccaaggacatcctgaccctgcggctggacgtgatgatggagactgagaaccgcctccacttcacgatcaaagatccagctaacaggcgctacgaggtgcccttggagaccccgcgtgtccacagccgggcaccgtccccactctacagcgtggagttctccgaggagcccttcggggtgatcgtgcaccggcagctggacggccgcgtgctgctgaacacgacggtggcgcccctgttctttgcggaccagttccttcagctgtccacctcgctgccctcgcagtatatcacaggcctcgccgagcacctcagtcccctgatgctcagcaccagctggaccaggatcaccctgtggaaccgggaccttgcgcccacgcccggtgcgaacctctacgggtctcaccctttctacctggcgctggaggacggcgggtcggcacacggggtgttcctgctaaacagcaacgccatggacgtggtcctgcagccgagccctgcccttagctggaggtcgacaggtgggatcctggacgtctacatcttcctgggcccagagcccaagagcgtggtgcagcagtacctggacgtggtgggatacccgttcatgccgccatactggggcctgggcttccacctgtgccgctggggctactcctccaccgctatcacccgccaggtggtggagaacatgaccagggcccacttccccctggacgtccagtggaacgatctggactacatggactcccggagggacttcacgttcaacaaggatggcttccgggacttcccggccatggtgcaggagctgcaccagggcggccggcgctacatgatgatcgtggatcctgccatcagcagctcgggccctgccgggagctacaggccctacgacgagggtctgcggaggggggttttcatcaccaacgagaccggccagccgctgattgggaaggtgtggcccgggtccactgccttccccgacttcaccaaccccacagccctggcctggtgggaggacatggtggctgagttccatgaccaggtgcccttcgacggcatgtggattgacatgaacgagccttccaacttcatcagaggctctgaggacggctgccccaacaacgagctggagaacccaccctacgtgcctggggtggttggggggaccctccaggcggccaccatctgtgcctccagccaccagtttctctccacacactacaacctgcacaacctctacggcctgaccgaagccatcgcctcccacagggcgctggtgaaggctcgggggacacgcccatttgtgatctcccgctcgacctttgctggccacggccgatacgccggccactggacgggggacgtgtggagctcctgggagcagctcgcctcctccgtgccagaaatcctgcagtttaacctgctgggggtgcctctggtcggggccgacgtctgcggcttcctgggcaacacctcagaggagctgtgtgtgcgctggacccagctgggggccttctaccccttcatgcggaaccacaacagcctgctcagtctgccccaggagccgtacagcttcagcgagccggcccagcaggccatgaggaaggccctcaccctgcgctacgcactcctcccccacctctacacactgttccaccaggcccacgtcgcgggggagaccgtggcccggcccctcttcctggagttccccaaggactctagcacctggactgtggaccaccagctcctgtggggggaggccctgctcatcaccccagtgctccaggccgggaaggccgaagtgactggctacttccccttgggcacatggtacgacctgcagacggtgccaatagaggcccttggcagcctcccacccccacctgcagctccccgtgagccagccatccacagcgaggggcagtgggtgacgctgccggcccccctggacaccatcaacgtgcacctccgggctgggtacatcatccccctgcagggccctggcctcacaaccacagagtcccgccagcagcccatggccctggctgtggccctgaccaagggtggagaggcccgaggggagctgttctgggacgacggagagagcctggaagtgctggagcgaggggcctacacacaggtcatcttcctggccaggaataacacgatcgtgaatgagctggtacgtgtgaccagtgagggagctggcctgcagctgcagaaggtgactgtcctgggcgtggccacggcgccccagcaggtcctctccaacggtgtccctgtctccaacttcacctacagccccgacaccaaggtcctggacatctgtgtctcgctgttgatgggagagcagtttctcgtcagctggtgttgataactcgag

SEQ ID NO: 112 - DNA, 8061 bp, synthetic construct; identical to SEQ ID NO: 36
  source 1..8061: mol_type = other DNA

SEQ ID NO: 113 - DNA, 8058 bp, synthetic construct; identical to SEQ ID NO: 37
  source 1..8058: mol_type = other DNA

SEQ ID NO: 114-143 - skipped (30 entries)

SEQ ID NO: 144 - DNA, 275 bp, synthetic construct
  source 1..275: mol_type = other DNA
ggcccgggaggcgccctttggaccttttgcaatcctggcgcactgaacccttgacccctgccctgcagcccccgcagcttgctgtttgcccactctatttgcccagccccagccctggagagtcctttagcagggcaaagtgcaacataggcagaccttaagggatgactcagtaacagataagctttgtgtgcctgcagggcatataaaacaggggcaaggcacagactcatagcagagcaatcaccaccaagcctggaataactgcagccacc

SEQ ID NO: 145 - DNA, 284 bp, synthetic construct
  source 1..284: mol_type = other DNA
tcagatcgcctggagacgccatccacgctgttttgacctccatagaagacaccgggaccgatccagcctccgcggccgggaacggtgcattggaacgcggattccccgtgccaagagtgacgtaagtaccgcctatagactctataggcacacccctttggctcttatgcatgaacggtggagggcagtgtagtctgagcagtactcgttgctgccgcgcgcgccaccagacataatagctgacagactaacagactgttcctttccatgggtcttttctgcag

SEQ ID NO: 146 - DNA, 636 bp, synthetic construct
  source 1..636: mol_type = other DNA
aggttaatttttaaaaagcagtcaaaagtccaagtggcccttggcagcatttactctctctgtttgctctggttaataatctcaggagcacaaacattcctgtaccggcccgggaggcgccctttggaccttttgcaatcctggcgcactgaacccttgacccctgccctgcagcccccgcagcttgctgtttgcccactctatttgcccagccccagccctggagagtcctttagcagggcaaagtgcaacataggcagaccttaagggatgactcagtaacagataagctttgtgtgcctgcagggcatataaaacaggggcaaggcacagactcatagcagagtcagatcgcctggagacgccatccacgctgttttgacctccatagaagacaccgggaccgatccagcctccgcggccgggaacggtgcattggaacgcggattccccgtgccaagagtgacgtaagtaccgcctatagactctataggcacacccctttggctcttatgcatgaacggtggagggcagtgtagtctgagcagtactcgttgctgccgcgcgcgccaccagacataatagctgacagactaacagactgttcctttccatgggtcttttctgcaggccacc

SEQ ID NO: 147 - DNA, 733 bp, synthetic construct
  source 1..733: mol_type = other DNA
caggctttcactttctcgccaacttacaaggcctttctgtgtaaacaatacctgaacctttaccccgttgcccggcaacggccaggtctgtgccaagtgtttgaggttaatttttaaaaagcagtcaaaagtccaagtggcccttggcagcatttactctctctgtttgctctggttaataatctcaggagcacaaacattccggcccgggaggcgccctttggaccttttgcaatcctggcgcactgaacccttgacccctgccctgcagcccccgcagcttgctgtttgcccactctatttgcccagccccagccctggagagtcctttagcagggcaaagtgcaacataggcagaccttaagggatgactcagtaacagataagctttgtgtgcctgcagggcatataaaacaggggcaaggcacagactcatagcagagtcagatcgcctggagacgccatccacgctgttttgacctccatagaagacaccgggaccgatccagcctccgcggccgggaacggtgcattggaacgcggattccccgtgccaagagtgacgtaagtaccgcctatagactctataggcacacccctttggctcttatgcatgaacggtggagggcagtgtagtctgagcagtactcgttgctgccgcgcgcgccaccagacataatagctgacagactaacagactgttcctttccatgggtcttttctgcaggccacc

SEQ ID NO: 148 - DNA, 653 bp, synthetic construct
  source 1..653: mol_type = other DNA
caggctttcactttctcgccaacttacaaggcctttctgtgtaaacaatacctgaacctttaccccgttgcccggcaacggccaggtctgtgccaagtgtttgccgatgacctaatgattctgagcttggcaaaggtcttatctcccagctcgcccaggcccagtgttccaggaatgtgacctttgctgcagcagccgctggagggggcagaggggatgggctggaggttgagcaaacagagcagcagaaaaggcagttcctcttctccagtgccctccttccctgtctctgcctctccctcccttcctcaggcatcagagcggagacttcagggagaccagagcccagcttgccaggcactgtcagatcgcctggagacgccatccacgctgttttgacctccatagaagacaccgggaccgatccagcctccgcggccgggaacggtgcattggaacgcggattccccgtgccaagagtgacgtaagtaccgcctatagactctataggcacacccctttggctcttatgcatgaacggtggagggcagtgtagtctgagcagtactcgttgctgccgcgcgcgccaccagacataatagctgacagactaacagactgttcctttccatgggtcttttctgcaggccacc

SEQ ID NO: 149 - DNA, 543 bp, synthetic construct
  source 1..543: mol_type = other DNA
aggttaatttttaaaaagcagtcaaaagtccaagtggcccttggcagcatttactctctctgtttgctctggttaataatctcaggagcacaaacattccggcccgggaggcgccctttggaccttttgcaatcctggcgcactgaacccttgacccctgccctgcagcccccgcagcttgctgtttgcccactctatttgcccagccccaggggcatataaaacaggggcaaggcacagactcatagcagagtcagatcgcctggagacgccatccacgctgttttgacctccatagaagacaccgggaccgatccagcctccgcggccgggaacggtgcattggaacgcggattccccgtgccaagagtgacgtaagtaccgcctatagactctataggcacacccctttggctcttatgcatgaacggtggagggcagtgtagtctgagcagtactcgttgctgccgcgcgcgccaccagacataatagctgacagactaacagactgttcctttccatgggtcttttctgcaggccacc

SEQ ID NO: 150 - DNA, 530 bp, synthetic construct
  source 1..530: mol_type = other DNA
ggcccgggaggcgccctttggaccttttgcaatcctggcgcactgaacccttgacccctgccctgcagcccccgcagcttgctgtttgcccactctatttgcccagccccagccctggagagtcctttagcagggcaaagtgcaacataggcagaccttaagggatgactcagtaacagataagctttgtgtgcctgcagggcatataaaacaggggcaaggcacagactcatagcagagtcagatcgcctggagacgccatccacgctgttttgacctccatagaagacaccgggaccgatccagcctccgcggccgggaacggtgcattggaacgcggattccccgtgccaagagtgacgtaagtaccgcctatagactctataggcacacccctttggctcttatgcatgaacggtggagggcagtgtagtctgagcagtactcgttgctgccgcgcgcgccaccagacataatagctgacagactaacagactgttcctttccatgggtcttttctgcaggccacc

SEQ ID NO: 151-153 - skipped (3 entries)

SEQ ID NO: 154 - DNA, 6557 bp, synthetic construct
  source 1..6557: mol_type = other DNA
gccattcgccattcaggctgcgcaactgttgggaagggcgatcggtgcgggcctcttcgctattacgccagctggcgaaagggggatgtgctgcaaggcgattaagttgggtaacgccagggttttcccagtcacgacgttgtaaaacgacggccagtgaattcctcgagatttaaatgacgttggccactccctctctgcgcgctcgctcgctcactgaggccgggcgaccaaaggtcgcccgacgcccgggctttgcccgggcggcctcagtgagcgagcgagcgcgcagagagggagtggccaactccatcactaggggttcctgagtttaaacttcgtcgaggccgcacgcgtaggttaatttttaaaaagcagtcaaaagtccaagtggcccttggcagcatttactctctctgtttgctctggttaataatctcaggagcacaaacattccccctgttcaaacatgtcctaatactctgtctctgcaagggtcatcagtagttttccatcttactcaacatcctcccagtgagtcatatgtttgctcactgaaggttactagttaacaggcatcccttaaacaggatataaaaggacttcagcaggactgctcgaaacatcccactcagccaccatgggagtgaggcacccgccctgctcccaccggctcctggccgtctgcgccctcgtgtccttggcaaccgctgcactcctggggcacatcctactccatgatttcctgctggttccccgagagctgagtggctcctccccagtcctggaggagactcacccagctcaccagcagggagccagcagaccagggccccgggatgcccaggcacaccccggccgtcccagagcagtgcccacacagtgcgacgtcccccccaacagccgcttcgattgcgcccctgacaaggccatcacccaggaacagtgcgaggcccgcggctgctgctacatccctgcaaagcaggggctgcagggagcccagatggggcagccctggtgcttcttcccacccagctaccccagctacaagctggagaacctgagctcctctgaaatgggctacacggccaccctgacccgtaccacccccaccttcttccccaaggacatcctgaccctgcggctggacgtgatgatggagactgagaaccgcctccacttcacgatcaaagatccagctaacaggcgctacgaggtgcccttggagaccccgcgtgtccacagccgggcaccgtccccactctacagcgtggagttctccgaggagcccttcggggtgatcgtgcaccggcagctggacggccgcgtgctgctgaacacgacggtggcgcccctgttctttgcggaccagttccttcagctgtccacctcgctgccctcgcagtatatcacaggcctcgccgagcacctcagtcccctgatgctcagcaccagctggaccaggatcaccctgtggaaccgggaccttgcgcccacgcccggtgcgaacctctacgggtctcaccctttctacctggcgctggaggacggcgggtcggcacacggggtgttcctgctaaacagcaatgccatggatgtggtcctgcagccgagccctgcccttagctggaggtcgacaggtgggatcctggatgtctacatcttcctgggcccagagcccaagagcgtggtgcagcagtacctggacgttgtgggatacccgttcatgccgccatactggggcctgggcttccacctgtgccgctggggctactcctccaccgctatcacccgccaggtggtggagaacatgaccagggcccacttccccctggacgtccaatggaacgacctggactacatggactcccggagggacttcacgttcaacaaggatggcttccgggacttcccggccatggtgcaggagctgcaccagggcggccggcgctacatgatgatcgtggatcctgccatcagcagctcgggccctgccgggagctacaggccctacgacgagggtctgcggaggggggttttcatcaccaacgagaccggccagccgctgattgggaaggtatggcccgggtccactgccttccccgacttcaccaaccccacagccctggcctggtgggaggacatggtggctgagttccatgaccaggtgcccttcgacggcatgtggattgacatgaacgagccttccaacttcatcagaggctctgaggacggctgccccaacaatgagctggagaacccaccctacgtgcctggggtggttggggggaccctccaggcggccaccatctgtgcctccagccaccagtttctctccacacactacaacctgcacaacctctacggcctgaccgaagccatcgcctcccacagggcgctggtgaaggctcgggggacacgcccatttgtgatctcccgctcgacctttgctggccacggccgatacgccggccactggacgggggacgtgtggagctcctgggagcagctcgcctcctccgtgccagaaatcctgcagtttaacctgctgggggtgcctctggtcggggccgacgtctgcggcttcctgggcaacacctcagaggagctgtgtgtgcgctggacccagctgggggccttctaccccttcatgcggaaccacaacagcctgctcagtctgccccaggagccgtacagcttcagcgagccggcccagcaggccatgaggaaggccctcaccctgcgctacgcactcctcccccacctctacacactgttccaccaggcccacgtcgcgggggagaccgtggcccggcccctcttcctggagttccccaaggactctagcacctggactgtggaccaccagctcctgtggggggaggccctgctcatcaccccagtgctccaggccgggaaggccgaagtgactggctacttccccttgggcacatggtacgacctgcagacggtgccaatagaggcccttggcagcctcccacccccacctgcagctccccgtgagccagccatccacagcgaggggcagtgggtgacgctgccggcccccctggacaccatcaacgtccacctccgggctgggtacatcatccccctgcagggccctggcctcacaaccacagagtcccgccagcagcccatggccctggctgtggccctgaccaagggtggagaggcccgaggggagctgttctgggacgatggagagagcctggaagtgctggagcgaggggcctacacacaggtcatcttcctggccaggaataacacgatcgtgaatgagctggtacgtgtgaccagtgagggagctggcctgcagctgcagaaggtgactgtcctgggcgtggccacggcgccccagcaggtcctctccaacggtgtccctgtctccaacttcacctacagccccgacaccaaggtcctggacatctgtgtctcgctgttgatgggagagcagtttctcgtcagctggtgttagccgggcggagtgtgttagtctctccagagggaggctggttccccagggaagcagagcctgtgtgcgggcagcagctgtgtgcgggcctgggggttgttaagtgcaattatttttaataaaaggggcatttggaaaaaaaaaaaaaaggtagcagtcgacagatgaattctgcagatctgtggcttctagctgcccgggtggcatccctgtgacccctccccagtgcctctcctggccctggaagttgccactccagtgcccaccagccttgtcctaataaaattaagttgcatcattttgtctgactaggtgtccttctataatattatggggtggaggggggtggtatggagcaaggggcaagttgggaagacaacctgagttgttgggattccaggcatcgagtagataagtagcatggcgggttaatcattaactacacacgtgcggaccgagcggcctaagctcgcgaaggaacccctagtgatggagttggccactccctctctgcgcgctcgctcgctcactgaggccgggcgaccaaaggtcgcccgacgcccgggctttgcccgggcggcctcagtgagcgagcgagcgcgcagagagggagtggccaagacgatttaaatgacaagcttggcgtaatcatggtcatagctgtttcctgtgtgaaattgttatccgctcacaattccacacaacatacgagccggaagcataaagtgtaaagcctggggtgcctaatgagtgagctaactcacattaattgcgttgcgctcactgcccgctttccagtcgggaaacctgtcgtgccagctgcattaatgaatcggccaacgcgcggggagaggcggtttgcgtattgggcgctcttccgcttcctcgctcactgactcgctgcgctcggtcgttcggctgcggcgagcggtatcagctcactcaaaggcggtaatacggttatccacagaatcaggggataacgcaggaaagaacatgtgagcaaaaggccagcaaaaggccaggaaccgtaaaaaggccgcgttgctggcgtttttccataggctccgcccccctgacgagcatcacaaaaatcgacgctcaagtcagaggtggcgaaacccgacaggactataaagataccaggcgtttccccctggaagctccctcgtgcgctctcctgttccgaccctgccgcttaccggatacctgtccgcctttctcccttcgggaagcgtggcgctttctcatagctcacgctgtaggtatctcagttcggtgtaggtcgttcgctccaagctgggctgtgtgcacgaaccccccgttcagcccgaccgctgcgccttatccggtaactatcgtcttgagtccaacccggtaagacacgacttatcgccactggcagcagccactggtaacaggattagcagagcgaggtatgtaggcggtgctacagagttcttgaagtggtggcctaactacggctacactagaagaacagtatttggtatctgcgctctgctgaagccagttaccttcggaaaaagagttggtagctcttgatccggcaaacaaaccaccgctggtagcggtggtttttttgtttgcaagcagcagattacgcgcagaaaaaaaggatctcaagaagatcctttgatcttttctacggggtctgacgctcagtggaacgaaaactcacgttaagggattttggtcatgagattatcaaaaaggatcttcacctagatccttttaaattaaaaatgaagttttaaatcaatctaaagtatatatgagtaaacttggtctgacagttagaaaaactcatcgagcatcaaatgaaactgcaatttattcatatcaggattatcaataccatatttttgaaaaagccgtttctgtaatgaaggagaaaactcaccgaggcagttccataggatggcaagatcctggtatcggtctgcgattccgactcgtccaacatcaatacaacctattaatttcccctcgtcaaaaataaggttatcaagtgagaaatcaccatgagtgacgactgaatccggtgagaatggcaaaagtttatgcatttctttccagacttgttcaacaggccagccattacgctcgtcatcaaaatcactcgcatcaaccaaaccgttattcattcgtgattgcgcctgagcgagacgaaatacgcgatcgctgttaaaaggacaattacaaacaggaatcgaatgcaaccggcgcaggaacactgccagcgcatcaacaatattttcacctgaatcaggatattcttctaatacctggaatgctgtttttccggggatcgcagtggtgagtaaccatgcatcatcaggagtacggataaaatgcttgatggtcggaagaggcataaattccgtcagccagtttagtctgaccatctcatctgtaacatcattggcaacgctacctttgccatgtttcagaaacaactctggcgcatcgggcttcccatacaagcgatagattgtcgcacctgattgcccgacattatcgcgagcccatttatacccatataaatcagcatccatgttggaatttaatcgcggcctcgacgtttcccgttgaatatggctcatactcttcctttttcaatattattgaagcatttatcagggttattgtctcatgagcggatacatatttgaatgtatttagaaaaataaacaaataggggttccgcgcacatttccccgaaaagtgccacctgacgtctaagaaaccattattatcatgacattaacctataaaaataggcgtatcacgaggccctttcgtctcgcgcgtttcggtgatgacggtgaaaacctctgacacatgcagctcccggagacggtcacagcttgtctgtaagcggatgccgggagcagacaagcccgtcagggcgcgtcagcgggtgttggcgggtgtcggggctggcttaactatgcggcatcagagcagattgtactgagagtgcaccatatgcggtgtgaaataccgcacagatgcgtaaggagaaaataccgcatcaggc

SEQ ID NO: 155-157 - skipped (3 entries)

SEQ ID NO: 158 - DNA, 7266 bp, synthetic construct
  source 1..7266: mol_type = other DNA
gccattcgccattcaggctgcgcaactgttgggaagggcgatcggtgcgggcctcttcgctattacgccagctggcgaaagggggatgtgctgcaaggcgattaagttgggtaacgccagggttttcccagtcacgacgttgtaaaacgacggccagtgaattcctcgagatttaaatgacgttggccactccctctctgcgcgctcgctcgctcactgaggccgggcgaccaaaggtcgcccgacgcccgggctttgcccgggcggcctcagtgagcgagcgagcgcgcagagagggagtggccaactccatcactaggggttcctgagtttaaacttcgtcgaggccgcacgcgtaggttaatttttaaaaagcagtcaaaagtccaagtggcccttggcagcatttactctctctgtttgctctggttaataatctcaggagcacaaacattccccctgttcaaacatgtcctaatactctgtctctgcaagggtcatcagtagttttccatcttactcaacatcctcccagtgagtcatatgtttgctcactgaaggttactagttaacaggcatcccttaaacaggatataaaaggacttcagcaggactgctcgaaacatcccacttcagatcgcctggagacgccatccacgctgttttgacctccatagaagacaccgggaccgatccagcctccgcggccgggaacggtgcattggaacgcggattccccgtgccaagagtgacgtaagtaccgcctatagactctataggcacacccctttggctcttatgcatgaacggtggagggcagtgtagtctgagcagtactcgttgctgccgcgcgcgccaccagacataatagctgacagactaacagactgttcctttccatgggtcttttctgcaggccaccatgggagtgaggcacccgccctgctcccaccggctcctggccgtctgcgccctcgtgtccttggcaaccgctgcactcctggggcacatcctactccatgatttcctgctggttccccgagagctgagtggctcctccccagtcctggaggagactcacccagctcaccagcagggagccagcagaccagggccccgggatgcccaggcacaccccggccgtcccagagcagtgcccacacagtgcgacgtcccccccaacagccgcttcgattgcgcccctgacaaggccatcacccaggaacagtgcgaggcccgcggctgctgctacatccctgcaaagcaggggctgcagggagcccagatggggcagccctggtgcttcttcccacccagctaccccagctacaagctggagaacctgagctcctctgaaatgggctacacggccaccctgacccgtaccacccccaccttcttccccaaggacatcctgaccctgcggctggacgtgatgatggagactgagaaccgcctccacttcacgatcaaagatccagctaacaggcgctacgaggtgcccttggagaccccgcgtgtccacagccgggcaccgtccccactctacagcgtggagttctccgaggagcccttcggggtgatcgtgcaccggcagctggacggccgcgtgctgctgaacacgacggtggcgcccctgttctttgcggaccagttccttcagctgtccacctcgctgccctcgcagtatatcacaggcctcgccgagcacctcagtcccctgatgctcagcaccagctggaccaggatcaccctgtggaaccgggaccttgcgcccacgcccggtgcgaacctctacgggtctcaccctttctacctggcgctggaggacggcgggtcggcacacggggtgttcctgctaaacagcaatgccatggatgtggtcctgcagccgagccctgcccttagctggaggtcgacaggtgggatcctggatgtctacatcttcctgggcccagagcccaagagcgtggtgcagcagtacctggacgttgtgggatacccgttcatgccgccatactggggcctgggcttccacctgtgccgctggggctactcctccaccgctatcacccgccaggtggtggagaacatgaccagggcccacttccccctggacgtccaatggaacgacctggactacatggactcccggagggacttcacgttcaacaaggatggcttccgggacttcccggccatggtgcaggagctgcaccagggcggccggcgctacatgatgatcgtggatcctgccatcagcagctcgggccctgccgggagctacaggccctacgacgagggtctgcggaggggggttttcatcaccaacgagaccggccagccgctgattgggaaggtatggcccgggtccactgccttccccgacttcaccaaccccacagccctggcctggtgggaggacatggtggctgagttccatgaccaggtgcccttcgacggcatgtggattgacatgaacgagccttccaacttcatcagaggctctgaggacggctgccccaacaatgagctggagaacccaccctacgtgcctggggtggttggggggaccctccaggcggccaccatctgtgcctccagccaccagtttctctccacacactacaacctgcacaacctctacggcctgaccgaagccatcgcctcccacagggcgctggtgaaggctcgggggacacgcccatttgtgatctcccgctcgacctttgctggccacggccgatacgccggccactggacgggggacgtgtggagctcctgggagcagctcgcctcctccgtgccagaaatcctgcagtttaacctgctgggggtgcctctggtcggggccgacgtctgcggcttcctgggcaacacctcagaggagctgtgtgtgcgctggacccagctgggggccttctaccccttcatgcggaaccacaacagcctgctcagtctgccccaggagccgtacagcttcagcgagccggcccagcaggccatgaggaaggccctcaccctgcgctacgcactcctcccccacctctacacactgttccaccaggcccacgtcgcgggggagaccgtggcccggcccctcttcctggagttccccaaggactctagcacctggactgtggaccaccagctcctgtggggggaggccctgctcatcaccccagtgctccaggccgggaaggccgaagtgactggctacttccccttgggcacatggtacgacctgcagacggtgccaatagaggcccttggcagcctcccacccccacctgcagctccccgtgagccagccatccacagcgaggggcagtgggtgacgctgccggcccccctggacaccatcaacgtccacctccgggctgggtacatcatccccctgcagggccctggcctcacaaccacagagtcccgccagcagcccatggccctggctgtggccctgaccaagggtggagaggcccgaggggagctgttctgggacgatggagagagcctggaagtgctggagcgaggggcctacacacaggtcatcttcctggccaggaataacacgatcgtgaatgagctggtacgtgtgaccagtgagggagctggcctgcagctgcagaaggtgactgtcctgggcgtggccacggcgccccagcaggtcctctccaacggtgtccctgtctccaacttcacctacagccccgacaccaaggtcctggacatctgtgtctcgctgttgatgggagagcagtttctcgtcagctggtgttagcgagcggccgctcttagtagcagtatcgatcccagcccacttttccccaatacgactacgagatctgtggcttctagctgcccgggtggcatccctgtgacccctccccagtgcctctcctggccctggaagttgccactccagtgcccaccagccttgtcctaataaaattaagttgcatcattttgtctgactaggtgtccttctataatattatggggtggaggggggtggtatggagcaaggggcaagttggggtccttcaacgtcgaactgtagcactctggatagctagctagcgtttgtagatagtttcaaggatagcaaccaacaacacgatagtttagaaattgttctagatcttctgctactactcgagagatagttgacttctagaagactctggatagagagcttcctgtggtttctatttcaacacttcgagcgatttagatagaggcgtcaattgagaacaaaaactggacacctgtttctagaacactagtgctagtcttctcaaggcttgatacgtcctgccactcacacacaaaaaaccaacacacagattaatgaaaataaagatcttttattagagagcgagtggatagtttagagtcgcttgagacttatcctgtgtccaactagccaagagtagagagagagtgactaggtggatcgagagatcgtcgtctatttgactgctagcctgtgttctcgtcgtagtccaaatcttcaatactctggcgactagtaacttgaatctgtgtatctaacacgacaaggctactcctttgagtttctagtgataagtgcgactggatctagctagttgagtttctagaaactacgtccaaagctactagcactacacgtgcggaccgagcggcctaagctcgcgaaggaacccctagtgatggagttggccactccctctctgcgcgctcgctcgctcactgaggccgggcgaccaaaggtcgcccgacgcccgggctttgcccgggcggcctcagtgagcgagcgagcgcgcagagagggagtggccaagacgatttaaatgacaagcttggcgtaatcatggtcatagctgtttcctgtgtgaaattgttatccgctcacaattccacacaacatacgagccggaagcataaagtgtaaagcctggggtgcctaatgagtgagctaactcacattaattgcgttgcgctcactgcccgctttccagtcgggaaacctgtcgtgccagctgcattaatgaatcggccaacgcgcggggagaggcggtttgcgtattgggcgctcttccgcttcctcgctcactgactcgctgcgctcggtcgttcggctgcggcgagcggtatcagctcactcaaaggcggtaatacggttatccacagaatcaggggataacgcaggaaagaacatgtgagcaaaaggccagcaaaaggccaggaaccgtaaaaaggccgcgttgctggcgtttttccataggctccgcccccctgacgagcatcacaaaaatcgacgctcaagtcagaggtggcgaaacccgacaggactataaagataccaggcgtttccccctggaagctccctcgtgcgctctcctgttccgaccctgccgcttaccggatacctgtccgcctttctcccttcgggaagcgtggcgctttctcatagctcacgctgtaggtatctcagttcggtgtaggtcgttcgctccaagctgggctgtgtgcacgaaccccccgttcagcccgaccgctgcgccttatccggtaactatcgtcttgagtccaacccggtaagacacgacttatcgccactggcagcagccactggtaacaggattagcagagcgaggtatgtaggcggtgctacagagttcttgaagtggtggcctaactacggctacactagaagaacagtatttggtatctgcgctctgctgaagccagttaccttcggaaaaagagttggtagctcttgatccggcaaacaaaccaccgctggtagcggtggtttttttgtttgcaagcagcagattacgcgcagaaaaaaaggatctcaagaagatcctttgatcttttctacggggtctgacgctcagtggaacgaaaactcacgttaagggattttggtcatgagattatcaaaaaggatcttcacctagatccttttaaattaaaaatgaagttttaaatcaatctaaagtatatatgagtaaacttggtctgacagttagaaaaactcatcgagcatcaaatgaaactgcaatttattcatatcaggattatcaataccatatttttgaaaaagccgtttctgtaatgaaggagaaaactcaccgaggcagttccataggatggcaagatcctggtatcggtctgcgattccgactcgtccaacatcaatacaacctattaatttcccctcgtcaaaaataaggttatcaagtgagaaatcaccatgagtgacgactgaatccggtgagaatggcaaaagtttatgcatttctttccagacttgttcaacaggccagccattacgctcgtcatcaaaatcactcgcatcaaccaaaccgttattcattcgtgattgcgcctgagcgagacgaaatacgcgatcgctgttaaaaggacaattacaaacaggaatcgaatgcaaccggcgcaggaacactgccagcgcatcaacaatattttcacctgaatcaggatattcttctaatacctggaatgctgtttttccggggatcgcagtggtgagtaaccatgcatcatcaggagtacggataaaatgcttgatggtcggaagaggcataaattccgtcagccagtttagtctgaccatctcatctgtaacatcattggcaacgctacctttgccatgtttcagaaacaactctggcgcatcgggcttcccatacaagcgatagattgtcgcacctgattgcccgacattatcgcgagcccatttatacccatataaatcagcatccatgttggaatttaatcgcggcctcgacgtttcccgttgaatatggctcatactcttcctttttcaatattattgaagcatttatcagggttattgtctcatgagcggatacatatttgaatgtatttagaaaaataaacaaataggggttccgcgcacatttccccgaaaagtgccacctgacgtctaagaaaccattattatcatgacattaacctataaaaataggcgtatcacgaggccctttcgtctcgcgcgtttcggtgatgacggtgaaaacctctgacacatgcagctcccggagacggtcacagcttgtctgtaagcggatgccgggagcagacaagcccgtcagggcgcgtcagcgggtgttggcgggtgtcggggctggcttaactatgcggcatcagagcagattgtactgagagtgcaccatatgcggtgtgaaataccgcacagatgcgtaaggagaaaataccgcatcaggc

SEQ ID NO: 159-185 - skipped (27 entries)

SEQ ID NO: 186 - DNA, 180 bp, synthetic construct
  source 1..180: mol_type = other DNA
aggttaatttttaaaaagcagtcaaaagtccaagtggcccttggcagcatttactctctctgtttgctctggttaataatctcaggagcacaaacattccccctgttcaaacatgtcctaatactctgtctctgcaagggtcatcagtagttttccatcttactcaacatcctcccagtg

SEQ ID NO: 187-269 - skipped (83 entries)

SEQ ID NO: 270 - DNA, 280 bp, synthetic construct
  source 1..280: mol_type = other DNA
ccctggagagtcctttagcagggcaaagtgcaacataggcagaccttaagggatgactcagtaacagataagctttgtgtgcctgcagggggatgggaagagggtggggcaggagagggacataaaagggctctgaggcattgtactgtgaattccttcagtctcctgtttggagaagacagagccaatgaggccctcgttccagggaaacagaatatgctcagcatgacgcagcactccctgaactttccggttacatcacccaatagctgagatcaga

SEQ ID NO: 271 - DNA, 241 bp, synthetic construct
  source 1..241: mol_type = other DNA
ccctggagagtcctttagcagggcaaagtgcaacataggcagaccttaagggatgactcagtaacagataagctttgtgtgcctgcagggggatgggaagagggtggggcaggagagggacataaaagggctctgaggcattgtactgtgaattccttcagtctcctgctctgctcagccagtcagccctgcctcccttgtttaggaccacacagcactgctgggtgtctgcctttccttg

SEQ ID NO: 272 - skipped

SEQ ID NO: 273 - DNA, 212 bp, synthetic construct
  source 1..212: mol_type = other DNA
aggttaatttttaaaaagcagtcaaaagtccaagtggcccttggcagcatttactctctctgtttgctctggttaataatctcaggagcacaaacattcctttggagaagacagagccaatgaggccctcgttccagggaaacagaatatgctcagcatgacgcagcactccctgaactttccggttacatcacccaatagctgagatcaga

SEQ ID NO: 274 - DNA, 284 bp, synthetic construct
  source 1..284: mol_type = other DNA
cactgaacccttgacccctgccctgcagcccccgcagcttgctgtttgcccactctatttgcccagccccagaggttaatttttaaaaagcagtcaaaagtccaagtggcccttggcagcatttactctctctgtttgctctggttaataatctcaggagcacaaacattcctttggagaagacagagccaatgaggccctcgttccagggaaacagaatatgctcagcatgacgcagcactccctgaactttccggttacatcacccaatagctgagatcaga

SEQ ID NO: 275 - DNA, 240 bp, synthetic construct
  source 1..240: mol_type = other DNA
cactgaacccttgacccctgccctgcagcccccgcagcttgctgtttgcccactctatttgcccagccccagccctggagagtcctttagcagggcaaagtgcaacataggcagaccttaagggatgactcagtaacagataagctttgtgtgcctgcagggggatgggaagagggtggggcaggagagggacataaaagggctctgaggcattgtactgtgaattccttcagtctcctg

SEQ ID NO: 276 - DNA, 241 bp, synthetic construct; identical to SEQ ID NO: 271
  source 1..241: mol_type = other DNA

SEQ ID NO: 277 - DNA, 168 bp, synthetic construct
  source 1..168: mol_type = other DNA
ccctggagagtcctttagcagggcaaagtgcaacataggcagaccttaagggatgactcagtaacagataagctttgtgtgcctgcagggggatgggaagagggtggggcaggagagggacataaaagggctctgaggcattgtactgtgaattccttcagtctcctg

SEQ ID NO: 278 - DNA, 174 bp, synthetic construct
  source 1..174: mol_type = other DNA
ccctggagagtcctttagcagggcaaagtgcaacataggcagaccttaagggatgactcagtaacagataagctttgtgtgcctgcaccctggagagtcctttagcagggcaaagtgcaacataggcagaccttaagggatgactcagtaacagataagctttgtgtgcctgca

SEQ ID NO: 279 - DNA, 159 bp, synthetic construct
  source 1..159: mol_type = other DNA
cactgaacccttgacccctgccctgcagcccccgcagcttgctgtttgcccactctatttgcccagccccagccctggagagtcctttagcagggcaaagtgcaacataggcagaccttaagggatgactcagtaacagataagctttgtgtgcctgca

SEQ ID NO: 280 - DNA, 207 bp, synthetic construct
  source 1..207: mol_type = other DNA
agaatgaacattgaactttggactatacctgaggggtgaggtaaacaacaggactataaatggcccgggaggcgccctttggaccttttgcaatcctggcgcactgaacccttgacccctgccctgcagcccccgcagcttgctgtttgcccactctatttgcccagccccagggacagagctgatccttgaactcttaagttccac

SEQ ID NO: 281 - DNA, 313 bp, synthetic construct
  source 1..313: mol_type = other DNA
aggttaatttttaaaaagcagtcaaaagtccaagtggcccttggcagcatttactctctctgtttgctctggttaataatctcaggagcacaaacattcctgtaccagaatgaacattgaactttggactatacctgaggggtgaggtaaacaacaggactataaatggcccgggaggcgccctttggaccttttgcaatcctggcgcactgaacccttgacccctgccctgcagcccccgcagcttgctgtttgcccactctatttgcccagccccagggacagagctgatccttgaactcttaagttccac

SEQ ID NO: 282 - DNA, 269 bp, synthetic construct
  source 1..269: mol_type = other DNA
aagcaaatatttgtggttatggattaactcgaactgtttgcccactctatttgccctgtaccagaatgaacattgaactttggactatacctgaggggtgaggtaaacaacaggactataaatggcccgggaggcgccctttggaccttttgcaatcctggcgcactgaacccttgacccctgccctgcagcccccgcagcttgctgtttgcccactctatttgcccagccccagggacagagctgatccttgaactcttaagttccac

SEQ ID NO: 283 - DNA, 258 bp, synthetic construct
  source 1..258: mol_type = other DNA
ggcgccctttggaccttttgcaatcctggagcaaacagcaaacactgtaccagaatgaacattgaactttggactatacctgaggggtgaggtaaacaacaggactataaatggcccgggaggcgccctttggaccttttgcaatcctggcgcactgaacccttgacccctgccctgcagcccccgcagcttgctgtttgcccactctatttgcccagccccagggacagagctgatccttgaactcttaagttccac

SEQ ID NO: 284 - DNA, 194 bp, synthetic construct
  source 1..194: mol_type = other DNA
agaatgaacattgaactttggactatacctgaggggtgaggtaaacaacaggactataaatagaatgaacattgaactttggactatacctgaggggtgaggtaaacaacaggactataaatcactgaacccttgacccctgccctgcagcccccgcagcttgctgtttgcccactctatttgcccagccccag

SEQ ID NO: 285 - DNA, 199 bp, synthetic construct
  source 1..199: mol_type = other DNA
ggcccgggaggcgccctttggaccttttgcaatcctggcgcactgaacccttgacccctgccctgcagcccccgcagcttgctgtttgcccactctatttgcccagccccagccctggagagtcctttagcagggcaaagtgcaacataggcagaccttaagggatgactcagtaacagataagctttgtgtgcctgca

SEQ ID NO: 286 - DNA, 260 bp, synthetic construct
  source 1..260: mol_type = other DNA
agaatgaacattgaactttggactatacctgaggggtgaggtaaacaacaggactataaatggcccgggaggcgccctttggaccttttgcaatcctggcgcactgaacccttgacccctgccctgcagcccccgcagcttgctgtttgcccactctatttgcccagccccagccctggagagtcctttagcagggcaaagtgcaacataggcagaccttaagggatgactcagtaacagataagctttgtgtgcctgca

SEQ ID NO: 287 - DNA, 101 bp, synthetic construct
  source 1..101: mol_type = other DNA
agaatgaacattgaactttggactatacctgaggggtgaggtaaacaacaggactataaatggcccgggaggcgccctttggaccttttgcaatcctggcg

SEQ ID NO: 288 - DNA, 201 bp, synthetic construct
  source 1..201: mol_type = other DNA
gctggtttcttataaaactgatggaagatacaaacactattaaagaactgtttgcatgttgcaaatgatgtccaaagtccaaacattgttaataattaatactccaataaacatcatgtcagaatttctgttttcttttccctttgaacctttgcaggattgccacatcatcaggaccacaccttcatcaggaatgaatat

SEQ ID NO: 289 - DNA, 232 bp, synthetic construct
  source 1..232: mol_type = other DNA
attggcatcttctattgcttttcctggtgacttcatttttcactcttggctaaaaatgggtctctgatgatttattctatcctgggtgttgacaagctgaagaagttgtgtggggcctgctgccagtaaccctgggtgacgaagcgtgactcaccactccgaggtcagtggggggatggaaggcaggggagtcagctgacaagatctgctgctttgtcaccaggccttctgc

SEQ ID NO: 290 - DNA, 200 bp, synthetic construct
  source 1..200: mol_type = other DNA
tgaaatgcctgccatatattagtgccctgaagtccaaaggtagaggaaccgagtgtttaaaaattactgtggctgtggagtcaacatgatgtaaaaaaacaaacatttggataacaccaagaagccagatatggttgaaatgttgactggttgacaaaaataatttgggttgcttaatggtgcacaaaggtaatgcaaaa

SEQ ID NO: 291 - DNA, 103 bp, synthetic construct; identical to SEQ ID NO: 89
  source 1..103: mol_type = other DNA

SEQ ID NO: 292 - DNA, 402 bp, synthetic construct; identical to SEQ ID NO: 87
  source 1..402: mol_type = other DNA

SEQ ID NO: 293 - DNA, 103 bp, synthetic construct; identical to SEQ ID NO: 89
  source 1..103: mol_type = other DNA

SEQ ID NO: 294 - DNA, 299 bp, synthetic construct
  source 1..299: mol_type = other DNA
aggttaatttttaaaaagcagtcaaaagtccaagtggcccttggcagcatttactctctctgtttgctctggttaataatctcaggagcacaaacattccggcccgggaggcgccctttggaccttttgcaatcctggcgcactgaacccttgacccctgccctgcagcccccgcagcttgctgtttgcccactctatttgcccagccccagccctggagagtcctttagcagggcaaagtgcaacataggcagaccttaagggatgactcagtaacagataagctttgtgtgcctgca

SEQ ID NO: 295 - DNA, 212 bp, synthetic construct; identical to SEQ ID NO: 90
  source 1..212: mol_type = other DNA

SEQ ID NO: 296 - DNA, 499 bp, synthetic construct
  source 1..499: mol_type = other DNA
tgaaatgcctgccatatattagtgccctgaagtccaaaggtagaggaaccgagtgtttaaaaattactgtggctgtggagtcaacatgatgtaaaaaaacaaacatttggataacaccaagaagccagatatggttgaaatgttgactggttgacaaaaataatttgggttgcttaatggtgcacaaaggtaatgcaaaaaggttaatttttaaaaagcagtcaaaagtccaagtggcccttggcagcatttactctctctgtttgctctggttaataatctcaggagcacaaacattccggcccgggaggcgccctttggaccttttgcaatcctggcgcactgaacccttgacccctgccctgcagcccccgcagcttgctgtttgcccactctatttgcccagccccagccctggagagtcctttagcagggcaaagtgcaacataggcagaccttaagggatgactcagtaacagataagctttgtgtgcctgca

SEQ ID NO: 297 - DNA, 297 bp, synthetic construct
  source 1..297: mol_type = other DNA
ctttggaccttttgcaatcctggcgcactgaacccttgacccctgccctgcagcccccgcagcttgctgtttgcccactctatttgcccagccccagtgaaatgcctgccatatattagtgccctgaagtccaaaggtagaggaaccgagtgtttaaaaattactgtggctgtggagtcaacatgatgtaaaaaaacaaacatttggataacaccaagaagccagatatggttgaaatgttgactggttgacaaaaataatttgggttgcttaatggtgcacaaaggtaatgcaaaa

SEQ ID NO: 298 - DNA, 212 bp, synthetic construct; identical to SEQ ID NO: 90
  source 1..212: mol_type = other DNA

SEQ ID NO: 299 - DNA, 304 bp, synthetic construct
  source 1..304: mol_type = other DNA
gctggtttcttataaaactgatggaagatacaaacactattaaagaactgtttgcatgttgcaaatgatgtccaaagtccaaacattgttaataattaatactccaataaacatcatgtcagaatttctgttttcttttccctttgaacctttgcaggattgccacatcatcaggaccacaccttcatcaggaatgaatatcaggctttcactttctcgccaacttacaaggcctttctgtgtaaacaatacctgaacctttaccccgttgcccggcaacggccaggtctgtgccaagtgtttg

SEQ ID NO: 300 - DNA, 315 bp, synthetic construct
  source 1..315: mol_type = other DNA
aggttaatttttaaaaagcagtcaaaagtccaagtggcccttggcagcatttactctctctgtttgctctggttaataatctcaggagcacaaacattccggcccgggaggcgccctttggaccttttgcaatcctggcgcactgaacccttgacccctgccctgcagcccccgcagcttgctgtttgcccactctatttgcccagccccagcaggctttcactttctcgccaacttacaaggcctttctgtgtaaacaatacctgaacctttaccccgttgcccggcaacggccaggtctgtgccaagtgtttg

SEQ ID NO: 301 - DNA, 315 bp, synthetic construct; identical to SEQ ID NO: 300
  source 1..315: mol_type = other DNA

SEQ ID NO: 302 - DNA, 413 bp, synthetic construct
  source 1..413: mol_type = other DNA
aggttaatttttaaaaagcagtcaaaagtccaagtggcccttggcagcatttactctctctgtttgctctggttaataatctcaggagcacaaacattccggcccgggaggcgccctttggaccttttgcaatcctggcgcactgaacccttgacccctgccctgcagcccccgcagcttgctgtttgcccactctatttgcccagccccaggctggtttcttataaaactgatggaagatacaaacactattaaagaactgtttgcatgttgcaaatgatgtccaaagtccaaacattgttaataattaatactccaataaacatcatgtcagaatttctgttttcttttccctttgaacctttgcaggattgccacatcatcaggaccacaccttcatcaggaatgaatat

SEQ ID NO: 303 - DNA, 268 bp, synthetic construct
  source 1..268: mol_type = other DNA
aggttaatttttaaaaagcagtcaaaagtccaagtggcccttggcagcatttactctctctgtttgctctggttaataatctcaggagcacaaacattccggcccgggaggcgccctttggaccttttgcaatcctggcgcactgaacccttgacccctgccctgcagcccccgcagcttgctgtttgcccactctatttgcccagccccagaagcaaatatttgtggttatggattaactcgaactgtttgcccactctatttgccc

SEQ ID NO: 304 - DNA, 159 bp, synthetic construct
  source 1..159: mol_type = other DNA
aagcaaatatttgtggttatggattaactcgaactgtttgcccactctatttgccccaggctttcactttctcgccaacttacaaggcctttctgtgtaaacaatacctgaacctttaccccgttgcccggcaacggccaggtctgtgccaagtgtttg

SEQ ID NO: 305 - DNA, 159 bp, synthetic construct; identical to SEQ ID NO: 304
  source 1..159: mol_type = other DNA

SEQ ID NO: 306 - DNA, 243 bp, synthetic construct
  source 1..243: mol_type = other DNA
aggttaatttttaaaaagcagtcaaaagtccaagtggcccttggcagcatttactctctctgtttgctctggttaataatctcaggagcacaaacattccggcccgggaggcgccctttggaccttttgcaatcctggcgcaggctttcactttctcgccaacttacaaggcctttctgtgtaaacaatacctgaacctttaccccgttgcccggcaacggccaggtctgtgccaagtgtttg

SEQ ID NO: 307 - DNA, 243 bp, synthetic construct; identical to SEQ ID NO: 306
  source 1..243: mol_type = other DNA

SEQ ID NO: 308 - DNA, 335 bp, synthetic construct
  source 1..335: mol_type = other DNA
attggcatcttctattgcttttcctggtgacttcatttttcactcttggctaaaaatgggtctctgatgatttattctatcctgggtgttgacaagctgaagaagttgtgtggggcctgctgccagtaaccctgggtgacgaagcgtgactcaccactccgaggtcagtggggggatggaaggcaggggagtcagctgacaagatctgctgctttgtcaccaggccttctgccaggctttcactttctcgccaacttacaaggcctttctgtgtaaacaatacctgaacctttaccccgttgcccggcaacggccaggtctgtgccaagtgtttg

SEQ ID NO: 309 - DNA, 304 bp, synthetic construct
  source 1..304: mol_type = other DNA
caggctttcactttctcgccaacttacaaggcctttctgtgtaaacaatacctgaacctttaccccgttgcccggcaacggccaggtctgtgccaagtgtttggctggtttcttataaaactgatggaagatacaaacactattaaagaactgtttgcatgttgcaaatgatgtccaaagtccaaacattgttaataattaatactccaataaacatcatgtcagaatttctgttttcttttccctttgaacctttgcaggattgccacatcatcaggaccacaccttcatcaggaatgaatat

SEQ ID NO: 310 - DNA, 334 bp, synthetic construct
  source 1..334: mol_type = other DNA
ctgtttgctgcttgcaatgtttgcccattttagggaggttaatttttaaaaagcagtcaaaagtccaagtggcccttggcagcatttactctctctgtttgctctggttaataatctcaggagcacaaacattccggcccgggaggcgccctttggaccttttgcaatcctggcgcactgaacccttgacccctgccctgcagcccccgcagcttgctgtttgcccactctatttgcccagccccagccctggagagtcctttagcagggcaaagtgcaacataggcagaccttaagggatgactcagtaacagataagctttgtgtgcctgca

SEQ ID NO: 311 - DNA, 236 bp, synthetic construct
  source 1..236: mol_type = other DNA
ctgtttgctgcttgcaatgtttgcccattttaggggctggtttcttataaaactgatggaagatacaaacactattaaagaactgtttgcatgttgcaaatgatgtccaaagtccaaacattgttaataattaatactccaataaacatcatgtcagaatttctgttttcttttccctttgaacctttgcaggattgccacatcatcaggaccacaccttcatcaggaatgaatat

SEQ ID NO: 312 - DNA, 103 bp, synthetic construct; identical to SEQ ID NO: 89
  source 1..103: mol_type = other DNA

SEQ ID NO: 313 - DNA, 305 bp, synthetic construct; identical to SEQ ID NO: 88
  source 1..305: mol_type = other DNA

SEQ ID NO: 314 - DNA, 261 bp, synthetic construct
  source 1..261: mol_type = other DNA
aagcaaatatttgtggttatggattaactcgaactgtttgcccactctatttgccctgtaccggcccgggaggcgccctttggaccttttgcaatcctggcgcactgaacccttgacccctgccctgcagcccccgcagcttgctgtttgcccactctatttgcccagccccagccctggagagtcctttagcagggcaaagtgcaacataggcagaccttaagggatgactcagtaacagataagctttgtgtgcctgca

SEQ ID NO: 315 - DNA, 250 bp, synthetic construct
  source 1..250: mol_type = other DNA
ggcgccctttggaccttttgcaatcctggagcaaacagcaaacactgtaccggcccgggaggcgccctttggaccttttgcaatcctggcgcactgaacccttgacccctgccctgcagcccccgcagcttgctgtttgcccactctatttgcccagccccagccctggagagtcctttagcagggcaaagtgcaacataggcagaccttaagggatgactcagtaacagataagctttgtgtgcctgca

SEQ ID NO: 316 - DNA, 366 bp, synthetic construct
  source 1..366: mol_type = other DNA
aggttaatttttaaaaagcagtcaaaagtccaagtggcccttggcagcatttactctctctgtttgctctggttaataatctcaggagcacaaacattcctgtaccagaatgaacattgaactttggactatacctgaggggtgaggtaaacaacaggactataaatggcccgggaggcgccctttggaccttttgcaatcctggcgcactgaacccttgacccctgccctgcagcccccgcagcttgctgtttgcccactctatttgcccagccccagccctggagagtcctttagcagggcaaagtgcaacataggcagaccttaagggatgactcagtaacagataagctttgtgtgcctgca

SEQ ID NO: 317 - DNA, 322 bp, synthetic construct
  source 1..322: mol_type = other DNA
aagcaaatatttgtggttatggattaactcgaactgtttgcccactctatttgccctgtaccagaatgaacattgaactttggactatacctgaggggtgaggtaaacaacaggactataaatggcccgggaggcgccctttggaccttttgcaatcctggcgcactgaacccttgacccctgccctgcagcccccgcagcttgctgtttgcccactctatttgcccagccccagccctggagagtcctttagcagggcaaagtgcaacataggcagaccttaagggatgactcagtaacagataagctttgtgtgcctgca

SEQ ID NO: 318 - DNA, 311 bp, synthetic construct
  source 1..311: mol_type = other DNA
ggcgccctttggaccttttgcaatcctggagcaaacagcaaacactgtaccagaatgaacattgaactttggactatacctgaggggtgaggtaaacaacaggactataaatggcccgggaggcgccctttggaccttttgcaatcctggcgcactgaacccttgacccctgccctgcagcccccgcagcttgctgtttgcccactctatttgcccagccccagccctggagagtcctttagcagggcaaagtgcaacataggcagaccttaagggatgactcagtaacagataagctttgtgtgcctgca

SEQ ID NO: 319 - DNA, 207 bp, synthetic construct
  source 1..207: mol_type = other DNA
aggttaatttttaaaaagcagtcaaaagtccaagtggcccttggcagcatttactctctctgtttgctctggttaataatctcaggagcacaaacattcctgtaccagaatgaacattgaactttggactatacctgaggggtgaggtaaacaacaggactataaatggcccgggaggcgccctttggaccttttgcaatcctggcg

SEQ ID NO: 320 - DNA, 163 bp, synthetic construct
  source 1..163: mol_type = other DNA
aagcaaatatttgtggttatggattaactcgaactgtttgcccactctatttgccctgtaccagaatgaacattgaactttggactatacctgaggggtgaggtaaacaacaggactataaatggcccgggaggcgccctttggaccttttgcaatcctggcg

SEQ ID NO: 321 - DNA, 152 bp, synthetic construct
  source 1..152: mol_type = other DNA
ggcgccctttggaccttttgcaatcctggagcaaacagcaaacactgtaccagaatgaacattgaactttggactatacctgaggggtgaggtaaacaacaggactataaatggcccgggaggcgccctttggaccttttgcaatcctggcg

SEQ ID NO: 322 - DNA, 100 bp, synthetic construct
  source 1..100: mol_type = other DNA
aggttaatttttaaaaagcagtcaaaagtccaagtggcccttggcagcatttactctctctgtttgctctggttaataatctcaggagcacaaacattcc

SEQ ID NO: 323 - DNA, 146 bp, synthetic construct
  source 1..146: mol_type = other DNA
aggttaatttttaaaaagcagtcaaaagtccaagtggcccttggcagcatttactctctctgtttgctctggttaataatctcaggagcacaaacattcctgtaccggcccgggaggcgccctttggaccttttgcaatcctggcg

SEQ ID NO: 324 - DNA, 172 bp, synthetic construct
  source 1..172: mol_type = other DNA
tgctctctgacaaagatacggtgggtcccactgatgaactgtgctgccacagtaaatgtagccactatgcctatctccattctgaagatgtgccctgttcaaacatgtcctaatactctgtctctgcaagggtcatcagtagttttccatcttactcaacatcctcccagtg

SEQ ID NO: 325 - DNA, 180 bp, synthetic construct
  source 1..180: mol_type = other DNA
cctccccgtgttcctgctctttgtccctctgtcctacttagactaatatttgccttgggtactgcaaacaggaaatgggggagggacaggagtagggcggccctgttcaaacatgtcctaatactctgtctctgcaagggtcatcagtagttttccatcttactcaacatcctcccagtg

SEQ ID NO: 326 - DNA, 159 bp, synthetic construct
  source 1..159: mol_type = other DNA
ccgcccccactgaacccttgacccctgccctgcagcccccgcagcttgctgtttgcccactctatttgcccagccccagccctgttcaaacatgtcctaatactctgtctctgcaagggtcatcagtagttttccatcttactcaacatcctcccagtg

SEQ ID NO: 327 - DNA, 165 bp, synthetic construct
  source 1..165: mol_type = other DNA
aagctttctgaacagccaaacagagattccaaagttcaggcaccaaagttcagaccctaacagttatttacaagggtcagttaacccctgttcaaacatgtcctaatactctgtctctgcaagggtcatcagtagttttccatcttactcaacatcctcccagtg

SEQ ID NO: 328 - DNA, 140 bp, synthetic construct
  source 1..140: mol_type = other DNA
aggttaatttttaaaaagcagtcaaaagtccaagtggcccttggcagcatttactctctctgtttgctctggttaataatctcaggagcacaaacattccggcccgggaggcgccctttggaccttttgcaatcctggcg

SEQ ID NO: 329 - DNA, 100 bp, synthetic construct; identical to SEQ ID NO: 322
  source 1..100: mol_type = other DNA

SEQ ID NO: 330 - DNA, 233 bp, synthetic construct
  source 1..233: mol_type = other DNA
aggttaatttttaaaaagcagtcaaaagtccaagtggcccttggcagcatttactctctctgtttgctctggttaataatctcaggagcacaaacattcctgtaccggcccgggaggcgccctttggaccttttgcaatcctggcgccctggagagtcctttagcagggcaaagtgcaacataggcagaccttaagggatgactcagtaacagataagctttgtgtgcctgca

SEQ ID NO: 331 - DNA, 265 bp, synthetic construct
  source 1..265: mol_type = other DNA
aggttaatttttaaaaagcagtcaaaagtccaagtggcccttggcagcatttactctctctgtttgctctggttaataatctcaggagcacaaacattcctgtacccactgaacccttgacccctgccctgcagcccccgcagcttgctgtttgcccactctatttgcccagccccagccctggagagtcctttagcagggcaaagtgcaacataggcagaccttaagggatgactcagtaacagataagctttgtgtgcctgca

SEQ ID NO: 332 - DNA, 469 bp, synthetic construct
  source 1..469: mol_type = other DNA
caggctttcactttctcgccaacttacaaggcctttctgtgtaaacaatacctgaacctttaccccgttgcccggcaacggccaggtctgtgccaagtgtttgaggttaatttttaaaaagcagtcaaaagtccaagtggcccttggcagcatttactctctctgtttgctctggttaataatctcaggagcacaaacattcctgtaccagaatgaacattgaactttggactatacctgaggggtgaggtaaacaacaggactataaatggcccgggaggcgccctttggaccttttgcaatcctggcgcactgaacccttgacccctgccctgcagcccccgcagcttgctgtttgcccactctatttgcccagccccagccctggagagtcctttagcagggcaaagtgcaacataggcagaccttaagggatgactcagtaacagataagctttgtgtgcctgca

SEQ ID NO: 333 - DNA, 61 bp, synthetic construct
  source 1..61: mol_type = other DNA
agaatgaacattgaactttggactatacctgaggggtgaggtaaacaacaggactataaat

SEQ ID NO: 334 - DNA, 364 bp, synthetic construct
  source 1..364: mol_type = other DNA
caggctttcactttctcgccaacttacaaggcctttctgtgtaaacaatacctgaacctttaccccgttgcccggcaacggccaggtctgtgccaagtgtttgaagcaaatatttgtggttatggattaactcgaactgtttgcccactctatttgccctgtaccggcccgggaggcgccctttggaccttttgcaatcctggcgcactgaacccttgacccctgccctgcagcccccgcagcttgctgtttgcccactctatttgcccagccccagccctggagagtcctttagcagggcaaagtgcaacataggcagaccttaagggatgactcagtaacagataagctttgtgtgcctgca

SEQ ID NO: 335 - DNA, 425 bp, synthetic construct
  source 1..425: mol_type = other DNA
caggctttcactttctcgccaacttacaaggcctttctgtgtaaacaatacctgaacctttaccccgttgcccggcaacggccaggtctgtgccaagtgtttgaagcaaatatttgtggttatggattaactcgaactgtttgcccactctatttgccctgtaccagaatgaacattgaactttggactatacctgaggggtgaggtaaacaacaggactataaatggcccgggaggcgccctttggaccttttgcaatcctggcgcactgaacccttgacccctgccctgcagcccccgcagcttgctgtttgcccactctatttgcccagccccagccctggagagtcctttagcagggcaaagtgcaacataggcagaccttaagggatgactcagtaacagataagctttgtgtgcctgca

SEQ ID NO: 336 - DNA, 338 bp, synthetic construct
  source 1..338: mol_type = other DNA
caggctttcactttctcgccaacttacaaggcctttctgtgtaaacaatacctgaacctttaccccgttgcccggcaacggccaggtctgtgccaagtgtttgaagcaaatatttgtggttatggattaactcgaactgtttgcccactctatttgccctgtaccagaatgaacattgaactttggactatacctgaggggtgaggtaaacaacaggactataaatggcccgggaggcgccctttggaccttttgcaatcctggcgcactgaacccttgacccctgccctgcagcccccgcagcttgctgtttgcccactctatttgcccagccccag

SEQ ID NO: 337 - DNA, 140 bp, synthetic construct; identical to SEQ ID NO: 328
  source 1..140: mol_type = other DNA

SEQ ID NO: 338 - DNA, 203 bp, synthetic construct
  source 1..203: mol_type = other DNA
aggttaatttttaaaaagcagtcaaaagtccaagtggcccttggcagcatttactctctctgtttgctctggttaataatctcaggagcacaaacattcccaggctttcactttctcgccaacttacaaggcctttctgtgtaaacaatacctgaacctttaccccgttgcccggcaacggccaggtctgtgccaagtgtttg

SEQ ID NO: 339 - DNA, 180 bp, synthetic construct; identical to SEQ ID NO: 186
  source 1..180: mol_type = other DNA

SEQ ID NO: 340 - DNA, 80 bp, synthetic construct
  source 1..80: mol_type = other DNA
ccctgttcaaacatgtcctaatactctgtctctgcaagggtcatcagtagttttccatcttactcaacatcctcccagtg

SEQ ID NO: 341 - DNA, 146 bp, synthetic construct; identical to SEQ ID NO: 323
  source 1..146: mol_type = other DNA

SEQ ID NO: 342 - DNA, 356 bp, synthetic construct
  source 1..356: mol_type = other DNA
ccctggagagtcctttagcagggcaaagtgcaacataggcagaccttaagggatgactcagtaacagataagctttgtgtgcctgcagggggatgggaagagggtggggcaggagagggacataaaagggctctgaggcattgtactgtgaattccttcagtctcctgtttggagaagacagagccaatgaggccctcgttccagggaaacagaatatgctcagcatgacgcagcactccctgaactttccggttacatcacccaatagctgagatcagagggcatataaaacaggggcaaggcacagactcatagcagagcaatcaccaccaagcctggaataactgcagccacc

SEQ ID NO: 343 - DNA, 453 bp, synthetic construct
  source 1..453: mol_type = other DNA
cctggagagtcctttagcagggcaaagtgcaacataggcagaccttaagggatgactcagtaacagataagctttgtgtgcctgcagggggatgggaagagggtggggcaggagagggacataaaagggctctgaggcattgtactgtgaattccttcagtctcctgctctgctcagccagtcagccctgcctcccttgtttaggaccacacagcactgctgggtgtctgcctttccttgggtaatttttttttctggttaatatttagcaagaattctgcagagtgatcaaaaaaatcaaatactcagtatttcagaaatagattaaataggttacttttttactgataatgtgaaagaatgatataaaaacttgattttcctcaacaacattactttcttttgtaaatgtggtttctacaaagatgaaactactaaaacttacaggccacc

SEQ ID NO: 344 - DNA, 288 bp, synthetic construct
  source 1..288: mol_type = other DNA
aggttaatttttaaaaagcagtcaaaagtccaagtggcccttggcagcatttactctctctgtttgctctggttaataatctcaggagcacaaacattcctttggagaagacagagccaatgaggccctcgttccagggaaacagaatatgctcagcatgacgcagcactccctgaactttccggttacatcacccaatagctgagatcagagggcatataaaacaggggcaaggcacagactcatagcagagcaatcaccaccaagcctggaataactgcagccacc

SEQ ID NO: 345 - DNA, 360 bp, synthetic construct
  source 1..360: mol_type = other DNA
cactgaacccttgacccctgccctgcagcccccgcagcttgctgtttgcccactctatttgcccagccccagaggttaatttttaaaaagcagtcaaaagtccaagtggcccttggcagcatttactctctctgtttgctctggttaataatctcaggagcacaaacattcctttggagaagacagagccaatgaggccctcgttccagggaaacagaatatgctcagcatgacgcagcactccctgaactttccggttacatcacccaatagctgagatcagagggcatataaaacaggggcaaggcacagactcatagcagagcaatcaccaccaagcctggaataactgcagccacc

SEQ ID NO: 346 - DNA, 316 bp, synthetic construct
  source 1..316: mol_type = other DNA
cactgaacccttgacccctgccctgcagcccccgcagcttgctgtttgcccactctatttgcccagccccagccctggagagtcctttagcagggcaaagtgcaacataggcagaccttaagggatgactcagtaacagataagctttgtgtgcctgcagggggatgggaagagggtggggcaggagagggacataaaagggctctgaggcattgtactgtgaattccttcagtctcctggggcatataaaacaggggcaaggcacagactcatagcagagcaatcaccaccaagcctggaataactgcagccacc

SEQ ID NO: 347 - DNA, 411 bp, synthetic construct
  source 1..411: mol_type = other DNA
ccctggagagtcctttagcagggcaaagtgcaacataggcagaccttaagggatgactcagtaacagataagctttgtgtgcctgcagggggatgggaagagggtggggcaggagagggacataaaagggctctgaggcattgtactgtgaattccttcagtctcctgctctgctcagccagtcagccctgcctcccttgtttaggaccacacagcactgctgggtgtctgcctttccttgtggacttagcccctgtttgctcctccgataactggggtgaccttggttaatattcaccagcagcctcccccgttgcccctctggatccactgcttaaatacggacgaggacagggccctgtctcctcagcttcaggcaccaccactgacctgggacagtgaatcgccacc

SEQ ID NO: 348 - DNA, 338 bp, synthetic construct
  source 1..338: mol_type = other DNA
ccctggagagtcctttagcagggcaaagtgcaacataggcagaccttaagggatgactcagtaacagataagctttgtgtgcctgcagggggatgggaagagggtggggcaggagagggacataaaagggctctgaggcattgtactgtgaattccttcagtctcctgtggacttagcccctgtttgctcctccgataactggggtgaccttggttaatattcaccagcagcctcccccgttgcccctctggatccactgcttaaatacggacgaggacagggccctgtctcctcagcttcaggcaccaccactgacctgggacagtgaatcgccacc

SEQ ID NO: 349 - DNA, 250 bp, synthetic construct
  source 1..250: mol_type = other DNA
ccctggagagtcctttagcagggcaaagtgcaacataggcagaccttaagggatgactcagtaacagataagctttgtgtgcctgcaccctggagagtcctttagcagggcaaagtgcaacataggcagaccttaagggatgactcagtaacagataagctttgtgtgcctgcagggcatataaaacaggggcaaggcacagactcatagcagagcaatcaccaccaagcctggaataactgcagccacc

SEQ ID NO: 350 - DNA, 385 bp, synthetic construct
  source 1..385: mol_type = other DNA
cactgaacccttgacccctgccctgcagcccccgcagcttgctgtttgcccactctatttgcccagccccagccctggagagtcctttagcagggcaaagtgcaacataggcagaccttaagggatgactcagtaacagataagctttgtgtgcctgcactcttttgttttacatgaagggtctggcagccaaagcaatcactcaaagttcaaaccttatcattttttgctttgttcctcttggccttggttttgtacatcagctttgaaaataccatcccagggttaatgctggggttaatttataactaagagtgctctagttttgcaatacaggacatgctataaaaatggaaagatgttgctttctgagagatgcgccacc

SEQ ID NO: 351 - DNA, 283 bp, synthetic construct
  source 1..283: mol_type = other DNA
agaatgaacattgaactttggactatacctgaggggtgaggtaaacaacaggactataaatggcccgggaggcgccctttggaccttttgcaatcctggcgcactgaacccttgacccctgccctgcagcccccgcagcttgctgtttgcccactctatttgcccagccccagggacagagctgatccttgaactcttaagttccacgggcatataaaacaggggcaaggcacagactcatagcagagcaatcaccaccaagcctggaataactgcagccacc

SEQ ID NO: 352 - DNA, 389 bp, synthetic construct
  source 1..389: mol_type = other DNA
aggttaatttttaaaaagcagtcaaaagtccaagtggcccttggcagcatttactctctctgtttgctctggttaataatctcaggagcacaaacattcctgtaccagaatgaacattgaactttggactatacctgaggggtgaggtaaacaacaggactataaatggcccgggaggcgccctttggaccttttgcaatcctggcgcactgaacccttgacccctgccctgcagcccccgcagcttgctgtttgcccactctatttgcccagccccagggacagagctgatccttgaactcttaagttccacgggcatataaaacaggggcaaggcacagactcatagcagagcaatcaccaccaagcctggaataactgcagccacc

SEQ ID NO: 353 - DNA, 345 bp, synthetic construct
  source 1..345: mol_type = other DNA
aagcaaatatttgtggttatggattaactcgaactgtttgcccactctatttgccctgtaccagaatgaacattgaactttggactatacctgaggggtgaggtaaacaacaggactataaatggcccgggaggcgccctttggaccttttgcaatcctggcgcactgaacccttgacccctgccctgcagcccccgcagcttgctgtttgcccactctatttgcccagccccagggacagagctgatccttgaactcttaagttccacgggcatataaaacaggggcaaggcacagactcatagcagagcaatcaccaccaagcctggaataactgcagccacc

SEQ ID NO: 354 - DNA, 334 bp, synthetic construct
  source 1..334: mol_type = other DNA
ggcgccctttggaccttttgcaatcctggagcaaacagcaaacactgtaccagaatgaacattgaactttggactatacctgaggggtgaggtaaacaacaggactataaatggcccgggaggcgccctttggaccttttgcaatcctggcgcactgaacccttgacccctgccctgcagcccccgcagcttgctgtttgcccactctatttgcccagccccagggacagagctgatccttgaactcttaagttccacgggcatataaaacaggggcaaggcacagactcatagcagagcaatcaccaccaagcctggaataactgcagccacc

SEQ ID NO: 355 - DNA, 270 bp, synthetic construct
  source 1..270: mol_type = other DNA
agaatgaacattgaactttggactatacctgaggggtgaggtaaacaacaggactataaatagaatgaacattgaactttggactatacctgaggggtgaggtaaacaacaggactataaatcactgaacccttgacccctgccctgcagcccccgcagcttgctgtttgcccactctatttgcccagccccaggggcatataaaacaggggcaaggcacagactcatagcagagcaatcaccaccaagcctggaataactgcagccacc

SEQ ID NO: 356 - DNA, 275 bp, synthetic construct; identical to SEQ ID NO: 144
  source 1..275: mol_type = other DNA

SEQ ID NO: 357 - DNA, 336 bp, synthetic construct
  source 1..336: mol_type = other DNA
agaatgaacattgaactttggactatacctgaggggtgaggtaaacaacaggactataaatggcccgggaggcgccctttggaccttttgcaatcctggcgcactgaacccttgacccctgccctgcagcccccgcagcttgctgtttgcccactctatttgcccagccccagccctggagagtcctttagcagggcaaagtgcaacataggcagaccttaagggatgactcagtaacagataagctttgtgtgcctgcagggcatataaaacaggggcaaggcacagactcatagcagagcaatcaccaccaagcctggaataactgcagccacc

SEQ ID NO: 358 - DNA, 327 bp, synthetic construct
  source 1..327: mol_type = other DNA
agaatgaacattgaactttggactatacctgaggggtgaggtaaacaacaggactataaatggcccgggaggcgccctttggaccttttgcaatcctggcgctcttttgttttacatgaagggtctggcagccaaagcaatcactcaaagttcaaaccttatcattttttgctttgttcctcttggccttggttttgtacatcagctttgaaaataccatcccagggttaatgctggggttaatttataactaagagtgctctagttttgcaatacaggacatgctataaaaatggaaagatgttgctttctgagagatgcgccacc

SEQ ID NO: 359 - DNA, 480 bp, synthetic construct
  source 1..480: mol_type = other DNA
gctggtttcttataaaactgatggaagatacaaacactattaaagaactgtttgcatgttgcaaatgatgtccaaagtccaaacattgttaataattaatactccaataaacatcatgtcagaatttctgttttcttttccctttgaacctttgcaggattgccacatcatcaggaccacaccttcatcaggaatgaatatccgatgacctaatgattctgagcttggcaaaggtcttatctcccagctcgcccaggcccagtgttccaggaatgtgacctttgctgcagcagccgctggagggggcagaggggatgggctggaggttgagcaaacagagcagcagaaaaggcagttcctcttctccagtgccctccttccctgtctctgcctctccctcccttcctcaggcatcagagcggagacttcagggagaccagagcccagcttgccaggcactgagctagaagccctgccatg

SEQ ID NO: 360 - DNA, 511 bp, synthetic construct
  source 1..511: mol_type = other DNA
attggcatcttctattgcttttcctggtgacttcatttttcactcttggctaaaaatgggtctctgatgatttattctatcctgggtgttgacaagctgaagaagttgtgtggggcctgctgccagtaaccctgggtgacgaagcgtgactcaccactccgaggtcagtggggggatggaaggcaggggagtcagctgacaagatctgctgctttgtcaccaggccttctgcccgatgacctaatgattctgagcttggcaaaggtcttatctcccagctcgcccaggcccagtgttccaggaatgtgacctttgctgcagcagccgctggagggggcagaggggatgggctggaggttgagcaaacagagcagcagaaaaggcagttcctcttctccagtgccctccttccctgtctctgcctctccctcccttcctcaggcatcagagcggagacttcagggagaccagagcccagcttgccaggcactgagctagaagccctgccatg

SEQ ID NO: 361 - DNA, 479 bp, synthetic construct
  source 1..479: mol_type = other DNA
tgaaatgcctgccatatattagtgccctgaagtccaaaggtagaggaaccgagtgtttaaaaattactgtggctgtggagtcaacatgatgtaaaaaaacaaacatttggataacaccaagaagccagatatggttgaaatgttgactggttgacaaaaataatttgggttgcttaatggtgcacaaaggtaatgcaaaaccgatgacctaatgattctgagcttggcaaaggtcttatctcccagctcgcccaggcccagtgttccaggaatgtgacctttgctgcagcagccgctggagggggcagaggggatgggctggaggttgagcaaacagagcagcagaaaaggcagttcctcttctccagtgccctccttccctgtctctgcctctccctcccttcctcaggcatcagagcggagacttcagggagaccagagcccagcttgccaggcactgagctagaagccctgccatg

SEQ ID NO: 362 - DNA, 340 bp, synthetic construct
  source 1..340: mol_type = other DNA
caggctttcactttctcgccaacttacaaggcctttctgtgtaaacaatacctgaacctttaccccgttgcccggcaacggccaggtctgtgccaagtgtttgcctttgcaacagcttatcggaagcaaacaagctgaggggaattgagcaagaatttctgggataccaacagcataggaggaacaaaggacgtagagggagggttgactgtctacacaggacaaagccaatgattaaccaaacctcttgcagatttaaataggatgggaactaggagtggcagcaatcctttctttcagctggagtgctcctcaggagccagccccacccttagaaaag

SEQ ID NO: 363 - DNA, 575 bp, synthetic construct
  source 1..575: mol_type = other DNA
aggttaatttttaaaaagcagtcaaaagtccaagtggcccttggcagcatttactctctctgtttgctctggttaataatctcaggagcacaaacattccggcccgggaggcgccctttggaccttttgcaatcctggcgcactgaacccttgacccctgccctgcagcccccgcagcttgctgtttgcccactctatttgcccagccccagccctggagagtcctttagcagggcaaagtgcaacataggcagaccttaagggatgactcagtaacagataagctttgtgtgcctgcaccgatgacctaatgattctgagcttggcaaaggtcttatctcccagctcgcccaggcccagtgttccaggaatgtgacctttgctgcagcagccgctggagggggcagaggggatgggctggaggttgagcaaacagagcagcagaaaaggcagttcctcttctccagtgccctccttccctgtctctgcctctccctcccttcctcaggcatcagagcggagacttcagggagaccagagcccagcttgccaggcactgagctagaagccctgcc

SEQ ID NO: 364 - DNA, 488 bp, synthetic construct
  source 1..488: mol_type = other DNA
aggttaatttttaaaaagcagtcaaaagtccaagtggcccttggcagcatttactctctctgtttgctctggttaataatctcaggagcacaaacattccggcccgggaggcgccctttggaccttttgcaatcctggcgcactgaacccttgacccctgccctgcagcccccgcagcttgctgtttgcccactctatttgcccagccccagccgatgacctaatgattctgagcttggcaaaggtcttatctcccagctcgcccaggcccagtgttccaggaatgtgacctttgctgcagcagccgctggagggggcagaggggatgggctggaggttgagcaaacagagcagcagaaaaggcagttcctcttctccagtgccctccttccctgtctctgcctctccctcccttcctcaggcatcagagcggagacttcagggagaccagagcccagcttgccaggcactgagctagaagccctgcc

SEQ ID NO: 365 - DNA, 575 bp, synthetic construct
  source 1..575: mol_type = other DNA
tgaaatgcctgccatatattagtgccctgaagtccaaaggtagaggaaccgagtgtttaaaaattactgtggctgtggagtcaacatgatgtaaaaaaacaaacatttggataacaccaagaagccagatatggttgaaatgttgactggttgacaaaaataatttgggttgcttaatggtgcacaaaggtaatgcaaaaaggttaatttttaaaaagcagtcaaaagtccaagtggcccttggcagcatttactctctctgtttgctctggttaataatctcaggagcacaaacattccggcccgggaggcgccctttggaccttttgcaatcctggcgcactgaacccttgacccctgccctgcagcccccgcagcttgctgtttgcccactctatttgcccagccccagccctggagagtcctttagcagggcaaagtgcaacataggcagaccttaagggatgactcagtaacagataagctttgtgtgcctgcagggcatataaaacaggggcaaggcacagactcatagcagagcaatcaccaccaagcctggaataactgcagccacc

SEQ ID NO: 366 - DNA, 688 bp, synthetic construct
  source 1..688: mol_type = other DNA
aggttaatttttaaaaagcagtcaaaagtccaagtggcccttggcagcatttactctctctgtttgctctggttaataatctcaggagcacaaacattccggcccgggaggcgccctttggaccttttgcaatcctggcgcactgaacccttgacccctgccctgcagcccccgcagcttgctgtttgcccactctatttgcccagccccagtgaaatgcctgccatatattagtgccctgaagtccaaaggtagaggaaccgagtgtttaaaaattactgtggctgtggagtcaacatgatgtaaaaaaacaaacatttggataacaccaagaagccagatatggttgaaatgttgactggttgacaaaaataatttgggttgcttaatggtgcacaaaggtaatgcaaaaccgatgacctaatgattctgagcttggcaaaggtcttatctcccagctcgcccaggcccagtgttccaggaatgtgacctttgctgcagcagccgctggagggggcagaggggatgggctggaggttgagcaaacagagcagcagaaaaggcagttcctcttctccagtgccctccttccctgtctctgcctctccctcccttcctcaggcatcagagcggagacttcagggagaccagagcccagcttgccaggcactgagctagaagccctgcc

SEQ ID NO: 367 - DNA, 580 bp, synthetic construct
  source 1..580: mol_type = other DNA
gctggtttcttataaaactgatggaagatacaaacactattaaagaactgtttgcatgttgcaaatgatgtccaaagtccaaacattgttaataattaatactccaataaacatcatgtcagaatttctgttttcttttccctttgaacctttgcaggattgccacatcatcaggaccacaccttcatcaggaatgaatatcaggctttcactttctcgccaacttacaaggcctttctgtgtaaacaatacctgaacctttaccccgttgcccggcaacggccaggtctgtgccaagtgtttgccgatgacctaatgattctgagcttggcaaaggtcttatctcccagctcgcccaggcccagtgttccaggaatgtgacctttgctgcagcagccgctggagggggcagaggggatgggctggaggttgagcaaacagagcagcagaaaaggcagttcctcttctccagtgccctccttccctgtctctgcctctccctcccttcctcaggcatcagagcggagacttcagggagaccagagcccagcttgccaggcactgagctagaagccctgcc

SEQ ID NO: 368 - DNA, 391 bp, synthetic construct
  source 1..391: mol_type = other DNA
aggttaatttttaaaaagcagtcaaaagtccaagtggcccttggcagcatttactctctctgtttgctctggttaataatctcaggagcacaaacattccggcccgggaggcgccctttggaccttttgcaatcctggcgcactgaacccttgacccctgccctgcagcccccgcagcttgctgtttgcccactctatttgcccagccccagcaggctttcactttctcgccaacttacaaggcctttctgtgtaaacaatacctgaacctttaccccgttgcccggcaacggccaggtctgtgccaagtgtttggggcatataaaacaggggcaaggcacagactcatagcagagcaatcaccaccaagcctggaataactgcagccacc

SEQ ID NO: 369 - DNA, 507 bp, synthetic construct
  source 1..507: mol_type = other DNA
aggttaatttttaaaaagcagtcaaaagtccaagtggcccttggcagcatttactctctctgtttgctctggttaataatctcaggagcacaaacattccggcccgggaggcgccctttggaccttttgcaatcctggcgcactgaacccttgacccctgccctgcagcccccgcagcttgctgtttgcccactctatttgcccagccccagcaggctttcactttctcgccaacttacaaggcctttctgtgtaaacaatacctgaacctttaccccgttgcccggcaacggccaggtctgtgccaagtgtttggggcgactcagatcccagccagtggacttagcccctgtttgctcctccgataactggggtgaccttggttaatattcaccagcagcctcccccgttgcccctctggatccactgcttaaatacggacgaggacagggccctgtctcctcagcttcaggcaccaccactgacctgggacagtgaatcgccacc

SEQ ID NO: 370 - DNA, 689 bp, synthetic construct
  source 1..689: mol_type = other DNA
aggttaatttttaaaaagcagtcaaaagtccaagtggcccttggcagcatttactctctctgtttgctctggttaataatctcaggagcacaaacattccggcccgggaggcgccctttggaccttttgcaatcctggcgcactgaacccttgacccctgccctgcagcccccgcagcttgctgtttgcccactctatttgcccagccccaggctggtttcttataaaactgatggaagatacaaacactattaaagaactgtttgcatgttgcaaatgatgtccaaagtccaaacattgttaataattaatactccaataaacatcatgtcagaatttctgttttcttttccctttgaacctttgcaggattgccacatcatcaggaccacaccttcatcaggaatgaatatccgatgacctaatgattctgagcttggcaaaggtcttatctcccagctcgcccaggcccagtgttccaggaatgtgacctttgctgcagcagccgctggagggggcagaggggatgggctggaggttgagcaaacagagcagcagaaaaggcagttcctcttctccagtgccctccttccctgtctctgcctctccctcccttcctcaggcatcagagcggagacttcagggagaccagagcccagcttgccaggcactgagctagaagccctgcc

SEQ ID NO: 371 - DNA, 344 bp, synthetic construct
  source 1..344: mol_type = other DNA
aggttaatttttaaaaagcagtcaaaagtccaagtggcccttggcagcatttactctctctgtttgctctggttaataatctcaggagcacaaacattccggcccgggaggcgccctttggaccttttgcaatcctggcgcactgaacccttgacccctgccctgcagcccccgcagcttgctgtttgcccactctatttgcccagccccagaagcaaatatttgtggttatggattaactcgaactgtttgcccactctatttgcccgggcatataaaacaggggcaaggcacagactcatagcagagcaatcaccaccaagcctggaataactgcagccacc

SEQ ID NO: 372 - DNA, 401 bp, synthetic construct
  source 1..401: mol_type = other DNA
aagcaaatatttgtggttatggattaactcgaactgtttgcccactctatttgccccaggctttcactttctcgccaacttacaaggcctttctgtgtaaacaatacctgaacctttaccccgttgcccggcaacggccaggtctgtgccaagtgtttgcctttgcaacagcttatcggaagcaaacaagctgaggggaattgagcaagaatttctgggataccaacagcataggaggaacaaaggacgtagagggagggttgactgtctacacaggacaaagccaatgattaaccaaacctcttgcagatttaaataggatgggaactaggagtggcagcaatcctttctttcagctggagtgctcctcaggagccagccccacccttagaaaagccacc

SEQ ID NO: 373 - DNA, 435 bp, synthetic construct
  source 1..435: mol_type = other DNA
aagcaaatatttgtggttatggattaactcgaactgtttgcccactctatttgccccaggctttcactttctcgccaacttacaaggcctttctgtgtaaacaatacctgaacctttaccccgttgcccggcaacggccaggtctgtgccaagtgtttgccgatgacctaatgattctgagcttggcaaaggtcttatctcccagctcgcccaggcccagtgttccaggaatgtgacctttgctgcagcagccgctggagggggcagaggggatgggctggaggttgagcaaacagagcagcagaaaaggcagttcctcttctccagtgccctccttccctgtctctgcctctccctcccttcctcaggcatcagagcggagacttcagggagaccagagcccagcttgccaggcactgagctagaagccctgcc

SEQ ID NO: 374 - DNA, 485 bp, synthetic construct
  source 1..485: mol_type = other DNA
aggttaatttttaaaaagcagtcaaaagtccaagtggcccttggcagcatttactctctctgtttgctctggttaataatctcaggagcacaaacattccggcccgggaggcgccctttggaccttttgcaatcctggcgcaggctttcactttctcgccaacttacaaggcctttctgtgtaaacaatacctgaacctttaccccgttgcccggcaacggccaggtctgtgccaagtgtttgcctttgcaacagcttatcggaagcaaacaagctgaggggaattgagcaagaatttctgggataccaacagcataggaggaacaaaggacgtagagggagggttgactgtctacacaggacaaagccaatgattaaccaaacctcttgcagatttaaataggatgggaactaggagtggcagcaatcctttctttcagctggagtgctcctcaggagccagccccacccttagaaaagccacc

SEQ ID NO: 375 - DNA, 519 bp, synthetic construct
  source 1..519: mol_type = other DNA
aggttaatttttaaaaagcagtcaaaagtccaagtggcccttggcagcatttactctctctgtttgctctggttaataatctcaggagcacaaacattccggcccgggaggcgccctttggaccttttgcaatcctggcgcaggctttcactttctcgccaacttacaaggcctttctgtgtaaacaatacctgaacctttaccccgttgcccggcaacggccaggtctgtgccaagtgtttgccgatgacctaatgattctgagcttggcaaaggtcttatctcccagctcgcccaggcccagtgttccaggaatgtgacctttgctgcagcagccgctggagggggcagaggggatgggctggaggttgagcaaacagagcagcagaaaaggcagttcctcttctccagtgccctccttccctgtctctgcctctccctcccttcctcaggcatcagagcggagacttcagggagaccagagcccagcttgccaggcactgagctagaagccctgcc

SEQ ID NO: 376 - DNA, 611 bp, synthetic construct
  source 1..611: mol_type = other DNA
attggcatcttctattgcttttcctggtgacttcatttttcactcttggctaaaaatgggtctctgatgatttattctatcctgggtgttgacaagctgaagaagttgtgtggggcctgctgccagtaaccctgggtgacgaagcgtgactcaccactccgaggtcagtggggggatggaaggcaggggagtcagctgacaagatctgctgctttgtcaccaggccttctgccaggctttcactttctcgccaacttacaaggcctttctgtgtaaacaatacctgaacctttaccccgttgcccggcaacggccaggtctgtgccaagtgtttgccgatgacctaatgattctgagcttggcaaaggtcttatctcccagctcgcccaggcccagtgttccaggaatgtgacctttgctgcagcagccgctggagggggcagaggggatgggctggaggttgagcaaacagagcagcagaaaaggcagttcctcttctccagtgccctccttccctgtctctgcctctccctcccttcctcaggcatcagagcggagacttcagggagaccagagcccagcttgccaggcactgagctagaagccctgcc

SEQ ID NO: 377 - DNA, 580 bp, synthetic construct
  source 1..580: mol_type = other DNA
caggctttcactttctcgccaacttacaaggcctttctgtgtaaacaatacctgaacctttaccccgttgcccggcaacggccaggtctgtgccaagtgtttggctggtttcttataaaactgatggaagatacaaacactattaaagaactgtttgcatgttgcaaatgatgtccaaagtccaaacattgttaataattaatactccaataaacatcatgtcagaatttctgttttcttttccctttgaacctttgcaggattgccacatcatcaggaccacaccttcatcaggaatgaatatccgatgacctaatgattctgagcttggcaaaggtcttatctcccagctcgcccaggcccagtgttccaggaatgtgacctttgctgcagcagccgctggagggggcagaggggatgggctggaggttgagcaaacagagcagcagaaaaggcagttcctcttctccagtgccctccttccctgtctctgcctctccctcccttcctcaggcatcagagcggagacttcagggagaccagagcccagcttgccaggcactgagctagaagccctgcc

SEQ ID NO: 378 - DNA, 410 bp, synthetic construct
  source 1..410: mol_type = other DNA
ctgtttgctgcttgcaatgtttgcccattttagggaggttaatttttaaaaagcagtcaaaagtccaagtggcccttggcagcatttactctctctgtttgctctggttaataatctcaggagcacaaacattccggcccgggaggcgccctttggaccttttgcaatcctggcgcactgaacccttgacccctgccctgcagcccccgcagcttgctgtttgcccactctatttgcccagccccagccctggagagtcctttagcagggcaaagtgcaacataggcagaccttaagggatgactcagtaacagataagctttgtgtgcctgcagggcatataaaacaggggcaaggcacagactcatagcagagcaatcaccaccaagcctggaataactgcagccacc

SEQ ID NO: 379 - DNA, 512 bp, synthetic construct
  source 1..512: mol_type = other DNA
ctgtttgctgcttgcaatgtttgcccattttaggggctggtttcttataaaactgatggaagatacaaacactattaaagaactgtttgcatgttgcaaatgatgtccaaagtccaaacattgttaataattaatactccaataaacatcatgtcagaatttctgttttcttttccctttgaacctttgcaggattgccacatcatcaggaccacaccttcatcaggaatgaatatccgatgacctaatgattctgagcttggcaaaggtcttatctcccagctcgcccaggcccagtgttccaggaatgtgacctttgctgcagcagccgctggagggggcagaggggatgggctggaggttgagcaaacagagcagcagaaaaggcagttcctcttctccagtgccctccttccctgtctctgcctctccctcccttcctcaggcatcagagcggagacttcagggagaccagagcccagcttgccaggcactgagctagaagccctgcc

SEQ ID NO: 380 - DNA, 345 bp, synthetic construct
  source 1..345: mol_type = other DNA
caggctttcactttctcgccaacttacaaggcctttctgtgtaaacaatacctgaacctttaccccgttgcccggcaacggccaggtctgtgccaagtgtttgcctttgcaacagcttatcggaagcaaacaagctgaggggaattgagcaagaatttctgggataccaacagcataggaggaacaaaggacgtagagggagggttgactgtctacacaggacaaagccaatgattaaccaaacctcttgcagatttaaataggatgggaactaggagtggcagcaatcctttctttcagctggagtgctcctcaggagccagccccacccttagaaaagccacc

SEQ ID NO: 381 - DNA, 337 bp, synthetic construct
  source 1..337: mol_type = other DNA
aagcaaatatttgtggttatggattaactcgaactgtttgcccactctatttgccctgtaccggcccgggaggcgccctttggaccttttgcaatcctggcgcactgaacccttgacccctgccctgcagcccccgcagcttgctgtttgcccactctatttgcccagccccagccctggagagtcctttagcagggcaaagtgcaacataggcagaccttaagggatgactcagtaacagataagctttgtgtgcctgcagggcatataaaacaggggcaaggcacagactcatagcagagcaatcaccaccaagcctggaataactgcagccacc

SEQ ID NO: 382 - DNA, 326 bp, synthetic construct
  source 1..326: mol_type = other DNA
ggcgccctttggaccttttgcaatcctggagcaaacagcaaacactgtaccggcccgggaggcgccctttggaccttttgcaatcctggcgcactgaacccttgacccctgccctgcagcccccgcagcttgctgtttgcccactctatttgcccagccccagccctggagagtcctttagcagggcaaagtgcaacataggcagaccttaagggatgactcagtaacagataagctttgtgtgcctgcagggcatataaaacaggggcaaggcacagactcatagcagagcaatcaccaccaagcctggaataactgcagccacc

SEQ ID NO: 383 - DNA, 442 bp, synthetic construct
  source 1..442: mol_type = other DNA
aggttaatttttaaaaagcagtcaaaagtccaagtggcccttggcagcatttactctctctgtttgctctggttaataatctcaggagcacaaacattcctgtaccagaatgaacattgaactttggactatacctgaggggtgaggtaaacaacaggactataaatggcccgggaggcgccctttggaccttttgcaatcctggcgcactgaacccttgacccctgccctgcagcccccgcagcttgctgtttgcccactctatttgcccagccccagccctggagagtcctttagcagggcaaagtgcaacataggcagaccttaagggatgactcagtaacagataagctttgtgtgcctgcagggcatataaaacaggggcaaggcacagactcatagcagagcaatcaccaccaagcctggaataactgcagccacc

SEQ ID NO: 384 - DNA, 398 bp, synthetic construct
  source 1..398: mol_type = other DNA
aagcaaatatttgtggttatggattaactcgaactgtttgcccactctatttgccctgtaccagaatgaacattgaactttggactatacctgaggggtgaggtaaacaacaggactataaatggcccgggaggcgccctttggaccttttgcaatcctggcgcactgaacccttgacccctgccctgcagcccccgcagcttgctgtttgcccactctatttgcccagccccagccctggagagtcctttagcagggcaaagtgcaacataggcagaccttaagggatgactcagtaacagataagctttgtgtgcctgcagggcatataaaacaggggcaaggcacagactcatagcagagcaatcaccaccaagcctggaataactgcagccacc

SEQ ID NO: 385 - DNA, 387 bp, synthetic construct
  source 1..387: mol_type = other DNA
ggcgccctttggaccttttgcaatcctggagcaaacagcaaacactgtaccagaatgaacattgaactttggactatacctgaggggtgaggtaaacaacaggactataaatggcccgggaggcgccctttggaccttttgcaatcctggcgcactgaacccttgacccctgccctgcagcccccgcagcttgctgtttgcccactctatttgcccagccccagccctggagagtcctttagcagggcaaagtgcaacataggcagaccttaagggatgactcagtaacagataagctttgtgtgcctgcagggcatataaaacaggggcaaggcacagactcatagcagagcaatcaccaccaagcctggaataactgcagccacc

SEQ ID NO: 386 - DNA, 433 bp, synthetic construct
  source 1..433: mol_type = other DNA
aggttaatttttaaaaagcagtcaaaagtccaagtggcccttggcagcatttactctctctgtttgctctggttaataatctcaggagcacaaacattcctgtaccagaatgaacattgaactttggactatacctgaggggtgaggtaaacaacaggactataaatggcccgggaggcgccctttggaccttttgcaatcctggcgctcttttgttttacatgaagggtctggcagccaaagcaatcactcaaagttcaaaccttatcattttttgctttgttcctcttggccttggttttgtacatcagctttgaaaataccatcccagggttaatgctggggttaatttataactaagagtgctctagttttgcaatacaggacatgctataaaaatggaaagatgttgctttctgagagatgcgccacc

SEQ ID NO: 387 - DNA, 389 bp, synthetic construct
  source 1..389: mol_type = other DNA
aagcaaatatttgtggttatggattaactcgaactgtttgcccactctatttgccctgtaccagaatgaacattgaactttggactatacctgaggggtgaggtaaacaacaggactataaatggcccgggaggcgccctttggaccttttgcaatcctggcgctcttttgttttacatgaagggtctggcagccaaagcaatcactcaaagttcaaaccttatcattttttgctttgttcctcttggccttggttttgtacatcagctttgaaaataccatcccagggttaatgctggggttaatttataactaagagtgctctagttttgcaatacaggacatgctataaaaatggaaagatgttgctttctgagagatgcgccacc

SEQ ID NO: 388 - DNA, 378 bp, synthetic construct
  source 1..378: mol_type = other DNA
ggcgccctttggaccttttgcaatcctggagcaaacagcaaacactgtaccagaatgaacattgaactttggactatacctgaggggtgaggtaaacaacaggactataaatggcccgggaggcgccctttggaccttttgcaatcctggcgctcttttgttttacatgaagggtctggcagccaaagcaatcactcaaagttcaaaccttatcattttttgctttgttcctcttggccttggttttgtacatcagctttgaaaataccatcccagggttaatgctggggttaatttataactaagagtgctctagttttgcaatacaggacatgctataaaaatggaaagatgttgctttctgagagatgcgccacc

SEQ ID NO: 389 - DNA, 611 bp, synthetic construct; identical to SEQ ID NO: 376
  source 1..611: mol_type = other DNA

SEQ ID NO: 390 - DNA, 580 bp, synthetic construct; identical to SEQ ID NO: 377
  source 1..580: mol_type = other DNA

SEQ ID NO: 391 - DNA, 410 bp, synthetic construct; identical to SEQ ID NO: 378
  source 1..410: mol_type = other DNA

SEQ ID NO: 392 - DNA, 512 bp, synthetic construct; identical to SEQ ID NO: 379
  source 1..512: mol_type = other DNA

SEQ ID NO: 393 - DNA, 345 bp, synthetic construct; identical to SEQ ID NO: 380
  source 1..345: mol_type = other DNA

SEQ ID NO: 394 - DNA, 381 bp, synthetic construct; identical to SEQ ID NO: 94
  source 1..381: mol_type = other DNA

SEQ ID NO: 395 - DNA, 337 bp, synthetic construct; identical to SEQ ID NO: 381
  source 1..337: mol_type = other DNA

SEQ ID NO: 396 - DNA, 326 bp, synthetic construct; identical to SEQ ID NO: 382
  source 1..326: mol_type = other DNA

SEQ ID NO: 397 - DNA, 442 bp, synthetic construct; identical to SEQ ID NO: 383
  source 1..442: mol_type = other DNA

SEQ ID NO: 398 - DNA, 398 bp, synthetic construct; identical to SEQ ID NO: 384
  source 1..398: mol_type = other DNA

SEQ ID NO: 399 - DNA, 387 bp, synthetic construct; identical to SEQ ID NO: 385
  source 1..387: mol_type = other DNA

SEQ ID NO: 400 - DNA, 433 bp, synthetic construct; identical to SEQ ID NO: 386
  source 1..433: mol_type = other DNA

SEQ ID NO: 401 - DNA, 389 bp, synthetic construct; identical to SEQ ID NO: 387
  source 1..389: mol_type = other DNA

SEQ ID NO: 402 - DNA, 378 bp, synthetic construct; identical to SEQ ID NO: 388
  source 1..378: mol_type = other DNA

SEQ ID NO: 403 - DNA, 203 bp, synthetic construct
  source 1..203: mol_type = other DNA
aggttaatttttaaaaagcagtcaaaagtccaagtggcccttggcagcatttactctctctgtttgctctggttaataatctcaggagcacaaacattccagtcatatgtttgctcactgaaggttactagttaacaggcatcccttaaacaggatataaaaggacttcagcaggactgctcgaaacatcccactcagccacc

SEQ ID NO: 404 - DNA, 222 bp, synthetic construct
  source 1..222: mol_type = other DNA
aggttaatttttaaaaagcagtcaaaagtccaagtggcccttggcagcatttactctctctgtttgctctggttaataatctcaggagcacaaacattcctgtaccggcccgggaggcgccctttggaccttttgcaatcctggcggggcatataaaacaggggcaaggcacagactcatagcagagcaatcaccaccaagcctggaataactgcagccacc

SEQ ID NO: 405 - DNA, 275 bp, synthetic construct
  source 1..275: mol_type = other DNA
tgctctctgacaaagatacggtgggtcccactgatgaactgtgctgccacagtaaatgtagccactatgcctatctccattctgaagatgtgccctgttcaaacatgtcctaatactctgtctctgcaagggtcatcagtagttttccatcttactcaacatcctcccagtgagtcatatgtttgctcactgaaggttactagttaacaggcatcccttaaacaggatataaaaggacttcagcaggactgctcgaaacatcccactcagccacc

SEQ ID NO: 406 - DNA, 283 bp, synthetic construct
  source 1..283: mol_type = other DNA
cctccccgtgttcctgctctttgtccctctgtcctacttagactaatatttgccttgggtactgcaaacaggaaatgggggagggacaggagtagggcggccctgttcaaacatgtcctaatactctgtctctgcaagggtcatcagtagttttccatcttactcaacatcctcccagtgagtcatatgtttgctcactgaaggttactagttaacaggcatcccttaaacaggatataaaaggacttcagcaggactgctcgaaacatcccactcagccacc

SEQ ID NO: 407 - DNA, 262 bp, synthetic construct
  source 1..262: mol_type = other DNA
ccgcccccactgaacccttgacccctgccctgcagcccccgcagcttgctgtttgcccactctatttgcccagccccagccctgttcaaacatgtcctaatactctgtctctgcaagggtcatcagtagttttccatcttactcaacatcctcccagtgagtcatatgtttgctcactgaaggttactagttaacaggcatcccttaaacaggatataaaaggacttcagcaggactgctcgaaacatcccactcagccacc

SEQ ID NO: 408 - DNA, 268 bp, synthetic construct
  source 1..268: mol_type = other DNA
aagctttctgaacagccaaacagagattccaaagttcaggcaccaaagttcagaccctaacagttatttacaagggtcagttaacccctgttcaaacatgtcctaatactctgtctctgcaagggtcatcagtagttttccatcttactcaacatcctcccagtgagtcatatgtttgctcactgaaggttactagttaacaggcatcccttaaacaggatataaaaggacttcagcaggactgctcgaaacatcccactcagccacc

SEQ ID NO: 409 - DNA, 389 bp, synthetic construct; identical to SEQ ID NO: 387
  source 1..389: mol_type = other DNA

SEQ ID NO: 410 - DNA, 378 bp, synthetic construct; identical to SEQ ID NO: 388
  source 1..378: mol_type = other DNA

SEQ ID NO: 411 - DNA, 203 bp, synthetic construct; identical to SEQ ID NO: 403
  source 1..203: mol_type = other DNA

SEQ ID NO: 412 - DNA, 222 bp, synthetic construct; identical to SEQ ID NO: 404
  source 1..222: mol_type = other DNA

SEQ ID NO: 413 - DNA, 275 bp, synthetic construct; identical to SEQ ID NO: 405
  source 1..275: mol_type = other DNA

SEQ ID NO: 414 - DNA, 283 bp, synthetic construct; identical to SEQ ID NO: 406
  source 1..283: mol_type = other DNA

SEQ ID NO: 415 - DNA, 262 bp, synthetic construct; identical to SEQ ID NO: 407
  source 1..262: mol_type = other DNA

SEQ ID NO: 416 - DNA, 268 bp, synthetic construct; identical to SEQ ID NO: 408
  source 1..268: mol_type = other DNA

SEQ ID NO: 417 - DNA, 422 bp, synthetic construct
  source 1..422: mol_type = other DNA
aggttaatttttaaaaagcagtcaaaagtccaagtggcccttggcagcatttactctctctgtttgctctggttaataatctcaggagcacaaacattccggcccgggaggcgccctttggaccttttgcaatcctggcgccgatgacctaatgattctgagcttggcaaaggtcttatctcccagctcgcccaggcccagtgttccaggaatgtgacctttgctgcagcagccgctggagggggcagaggggatgggctggaggttgagcaaacagagcagcagaaaaggcagttcctcttctccagtgccctccttccctgtctctgcctctccctcccttcctcaggcatcagagcggagacttcagggagaccagagcccagcttgccaggcactgagctagaagccctgccgccacc

SEQ ID NO: 418 - DNA, 176 bp, synthetic construct
  source 1..176: mol_type = other DNA
aggttaatttttaaaaagcagtcaaaagtccaagtggcccttggcagcatttactctctctgtttgctctggttaataatctcaggagcacaaacattccgggcatataaaacaggggcaaggcacagactcatagcagagcaatcaccaccaagcctggaataactgcagccacc

SEQ ID NO: 419 - DNA, 309 bp, synthetic construct
  source 1..309: mol_type = other DNA
aggttaatttttaaaaagcagtcaaaagtccaagtggcccttggcagcatttactctctctgtttgctctggttaataatctcaggagcacaaacattcctgtaccggcccgggaggcgccctttggaccttttgcaatcctggcgccctggagagtcctttagcagggcaaagtgcaacataggcagaccttaagggatgactcagtaacagataagctttgtgtgcctgcagggcatataaaacaggggcaaggcacagactcatagcagagcaatcaccaccaagcctggaataactgcagccacc

SEQ ID NO: 420 - DNA, 341 bp, synthetic construct
  source 1..341: mol_type = other DNA
aggttaatttttaaaaagcagtcaaaagtccaagtggcccttggcagcatttactctctctgtttgctctggttaataatctcaggagcacaaacattcctgtacccactgaacccttgacccctgccctgcagcccccgcagcttgctgtttgcccactctatttgcccagccccagccctggagagtcctttagcagggcaaagtgcaacataggcagaccttaagggatgactcagtaacagataagctttgtgtgcctgcagggcatataaaacaggggcaaggcacagactcatagcagagcaatcaccaccaagcctggaataactgcagccacc

SEQ ID NO: 421 - DNA, 545 bp, synthetic construct
  source 1..545: mol_type = other DNA
caggctttcactttctcgccaacttacaaggcctttctgtgtaaacaatacctgaacctttaccccgttgcccggcaacggccaggtctgtgccaagtgtttgaggttaatttttaaaaagcagtcaaaagtccaagtggcccttggcagcatttactctctctgtttgctctggttaataatctcaggagcacaaacattcctgtaccagaatgaacattgaactttggactatacctgaggggtgaggtaaacaacaggactataaatggcccgggaggcgccctttggaccttttgcaatcctggcgcactgaacccttgacccctgccctgcagcccccgcagcttgctgtttgcccactctatttgcccagccccagccctggagagtcctttagcagggcaaagtgcaacataggcagaccttaagggatgactcagtaacagataagctttgtgtgcctgcagggcatataaaacaggggcaaggcacagactcatagcagagcaatcaccaccaagcctggaataactgcagccacc

SEQ ID NO: 422 - DNA, 137 bp, synthetic construct
  source 1..137: mol_type = other DNA
agaatgaacattgaactttggactatacctgaggggtgaggtaaacaacaggactataaatgggcatataaaacaggggcaaggcacagactcatagcagagcaatcaccaccaagcctggaataactgcagccacc

SEQ ID NO: 423 - DNA, 440 bp, synthetic construct
  source 1..440: mol_type = other DNA
caggctttcactttctcgccaacttacaaggcctttctgtgtaaacaatacctgaacctttaccccgttgcccggcaacggccaggtctgtgccaagtgtttgaagcaaatatttgtggttatggattaactcgaactgtttgcccactctatttgccctgtaccggcccgggaggcgccctttggaccttttgcaatcctggcgcactgaacccttgacccctgccctgcagcccccgcagcttgctgtttgcccactctatttgcccagccccagccctggagagtcctttagcagggcaaagtgcaacataggcagaccttaagggatgactcagtaacagataagctttgtgtgcctgcagggcatataaaacaggggcaaggcacagactcatagcagagcaatcaccaccaagcctggaataactgcagccacc

SEQ ID NO: 424 - DNA, 501 bp, synthetic construct
  source 1..501: mol_type = other DNA
caggctttcactttctcgccaacttacaaggcctttctgtgtaaacaatacctgaacctttaccccgttgcccggcaacggccaggtctgtgccaagtgtttgaagcaaatatttgtggttatggattaactcgaactgtttgcccactctatttgccctgtaccagaatgaacattgaactttggactatacctgaggggtgaggtaaacaacaggactataaatggcccgggaggcgccctttggaccttttgcaatcctggcgcactgaacccttgacccctgccctgcagcccccgcagcttgctgtttgcccactctatttgcccagccccagccctggagagtcctttagcagggcaaagtgcaacataggcagaccttaagggatgactcagtaacagataagctttgtgtgcctgcagggcatataaaacaggggcaaggcacagactcatagcagagcaatcaccaccaagcctggaataactgcagccacc

SEQ ID NO: 425 - DNA, 414 bp, synthetic construct
  source 1..414: mol_type = other DNA
caggctttcactttctcgccaacttacaaggcctttctgtgtaaacaatacctgaacctttaccccgttgcccggcaacggccaggtctgtgccaagtgtttgaagcaaatatttgtggttatggattaactcgaactgtttgcccactctatttgccctgtaccagaatgaacattgaactttggactatacctgaggggtgaggtaaacaacaggactataaatggcccgggaggcgccctttggaccttttgcaatcctggcgcactgaacccttgacccctgccctgcagcccccgcagcttgctgtttgcccactctatttgcccagccccaggggcatataaaacaggggcaaggcacagactcatagcagagcaatcaccaccaagcctggaataactgcagccacc

SEQ ID NO: 426 - DNA, 243 bp, synthetic construct
  source 1..243: mol_type = other DNA
aggttaatttttaaaaagcagtcaaaagtccaagtggcccttggcagcatttactctctctgtttgctctggttaataatctcaggagcacaaacattccggcccgggaggcgccctttggaccttttgcaatcctggcgagtcatatgtttgctcactgaaggttactagttaacaggcatcccttaaacaggatataaaaggacttcagcaggactgctcgaaacatcccactcagccacc

SEQ ID NO: 427 - DNA, 279 bp, synthetic construct
  source 1..279: mol_type = other DNA
aggttaatttttaaaaagcagtcaaaagtccaagtggcccttggcagcatttactctctctgtttgctctggttaataatctcaggagcacaaacattcccaggctttcactttctcgccaacttacaaggcctttctgtgtaaacaatacctgaacctttaccccgttgcccggcaacggccaggtctgtgccaagtgtttggggcatataaaacaggggcaaggcacagactcatagcagagcaatcaccaccaagcctggaataactgcagccacc

SEQ ID NO: 428 - DNA, 256 bp, synthetic construct
  source 1..256: mol_type = other DNA
aggttaatttttaaaaagcagtcaaaagtccaagtggcccttggcagcatttactctctctgtttgctctggttaataatctcaggagcacaaacattccccctgttcaaacatgtcctaatactctgtctctgcaagggtcatcagtagttttccatcttactcaacatcctcccagtggggcatataaaacaggggcaaggcacagactcatagcagagcaatcaccaccaagcctggaataactgcagccacc

SEQ ID NO: 429 - DNA, 183 bp, synthetic construct
  source 1..183: mol_type = other DNA
ccctgttcaaacatgtcctaatactctgtctctgcaagggtcatcagtagttttccatcttactcaacatcctcccagtgagtcatatgtttgctcactgaaggttactagttaacaggcatcccttaaacaggatataaaaggacttcagcaggactgctcgaaacatcccactcagccacc

SEQ ID NO: 430 - DNA, 249 bp, synthetic construct
  source 1..249: mol_type = other DNA
aggttaatttttaaaaagcagtcaaaagtccaagtggcccttggcagcatttactctctctgtttgctctggttaataatctcaggagcacaaacattcctgtaccggcccgggaggcgccctttggaccttttgcaatcctggcgagtcatatgtttgctcactgaaggttactagttaacaggcatcccttaaacaggatataaaaggacttcagcaggactgctcgaaacatcccactcagccacc

SEQ ID NO: 431 - DNA, 349 bp, synthetic construct
  source 1..349: mol_type = other DNA
tcgagcttgggctgcaggtcgagggcactgggaggatgttgagtaagatggaaaactactgatgacccttgcagagacagagtattaggacatgtttgaacaggggccgggcgatcagcaggtagctctagaggatccccgtctgtctgcacatttcgtagagcgagtgttccgatactctaatctccctaggcaaggttcatatttgtgtaggttacttattctccttttgttgactaagtcaataatcagaatcagcaggtttggagtcagcttggcagggatcagcagcctgggttggaaggagggggtataaaagccccttcaccaggagaagccgtcacacaga

SEQ ID NO: 432 - DNA, 558 bp, synthetic construct
  source 1..558: mol_type = other DNA
ccctaaaatgggcaaacattgcaagcagcaaacagcaaacacacagccctccctgcctgctgaccttggagctggggcagaggtcagagacctctctgggcccatgccacctccaacatccactcgaccccttggaatttcggtggagaggagcagaggttgtcctggcgtggtttaggtagtgtgagaggggaatgactcctttcggtaagtgcagtggaagctgtacactgcccaggcaaagcgtccgggcagcgtaggcgggcgactcagatcccagccagtggacttagcccctgtttgctcctccgataactggggtgaccttggttaatattcaccagcagcctcccccgttgcccctctggatccactgcttaaatacggacgaggacagggccctgtctcctcagcttcaggcaccaccactgacctgggacagtgaatccggactctaaggtaaatataaaatttttaagtgtataatgtgttaaactactgattctaattgtttctctcttttagattccaacctttggaactgaattctagaccacc

SEQ ID NO: 433 - DNA, 580 bp, Cytomegalovirus sp.
  source 1..580: mol_type = genomic DNA
atagtaatcaattacggggtcattagttcatagcccatatatggagttccgcgttacataacttacggtaaatggcccgcctggctgaccgcccaacgacccccgcccattgacgtcaataatgacgtatgttcccatagtaacgccaatagggactttccattgacgtcaatgggtggagtatttacggtaaactgcccacttggcagtacatcaagtgtatcatatgccaagtacgccccctattgacgtcaatgacggtaaatggcccgcctggcattatgcccagtacatgaccttatgggactttcctacttggcagtacatctacgtattagtcatcgctattaccatggtgatgcggttttggcagtacatcaatgggcgtggatagcggtttgactcacggggatttccaagtctccaccccattgacgtcaatgggagtttgttttggcaccaaaatcaacgggactttccaaaatgtcgtaacaactccgccccattgacgcaaatgggcggtaggcgtgtacggtgggaggtctatataagcagagctggtttagtgaaccgtcagatc

SEQ ID NO: 434 - DNA, 1775 bp, synthetic construct
  source 1..1775: mol_type = other DNA
agatctgaattcggtacctagttattaatagtaatcaattacggggtcattagttcatagcccatatatggagttccgcgttacataacttacggtaaatggcccgcctggctgaccgcccaacgacccccgcccattgacgtcaataatgacgtatgttcccatagtaacgccaatagggactttccattgacgtcaatgggtggagtatttacggtaaactgcccacttggcagtacatcaagtgtatcatatgccaagtacgccccctattgacgtcaatgacggtaaatggcccgcctggcattatgcccagtacatgaccttatgggactttcctacttggcagtacatctacgtattagtcatcgctattaccatggtcgaggtgagccccacgttctgcttcactctccccatctcccccccctccccacccccaattttgtatttatttattttttaattattttgtgcagcgatgggggcggggggggggggggggcgcgcgccaggcggggcggggcggggcgaggggcggggcggggcgaggcggagaggtgcggcggcagccaatcagagcggcgcgctccgaaagtttccttttatggcgaggcggcggcggcggcggccctataaaaagcgaagcgcgcggcgggcgggagtcgctgcgcgctgccttcgccccgtgccccgctccgccgccgcctcgcgccgcccgccccggctctgactgaccgcgttactcccacaggtgagcgggcgggacggcccttctcctccgggctgtaattagcgcttggtttaatgacggcttgtttcttttctgtggctgcgtgaaagccttgaggggctccgggagggccctttgtgcggggggagcggctcggggggtgcgtgcgtgtgtgtgtgcgtggggagcgccgcgtgcggctccgcgctgcccggcggctgtgagcgctgcgggcgcggcgcggggctttgtgcgctccgcagtgtgcgcgaggggagcgcggccgggggcggtgccccgcggtgcggggggggctgcgaggggaacaaaggctgcgtgcggggtgtgtgcgtgggggggtgagcagggggtgtgggcgcgtcggtcgggctgcaaccccccctgcacccccctccccgagttgctgagcacggcccggcttcgggtgcggggctccgtacggggcgtggcgcggggctcgccgtgccgggcggggggtggcggcaggtgggggtgccgggcggggcggggccgcctcgggccggggagggctcgggggaggggcgcggcggcccccggagcgccggcggctgtcgaggcgcggcgagccgcagccattgccttttatggtaatcgtgcgagagggcgcagggacttcctttgtcccaaatctgtgcggagccgaaatctgggaggcgccgccgcaccccctctagcgggcgcggggcgaagcggtgcggcgccggcaggaaggaaatgggcggggagggccttcgtgcgtcgccgcgccgccgtccccttctccctctccagcctcggggctgtccgcggggggacggctgccttcgggggggacggggcagggcggggttcggcttctggcgtgtgaccggcggctctagagcctctgctaaccatgttcatgccttcttctttttcctacagctcctgggcaacgtgctggttattgtgctgtctcatcattttggcaaagaattcctcgaagatctaggcaacgcgtctcgaggcggccgccgccacc

SEQ ID NO: 435 - DNA, 890 bp, synthetic construct
  source 1..890: mol_type = other DNA
aggttaatttttaaaaagcagtcaaaagtccaagtggcccttggcagcatttactctctctgtttgctctggttaataatctcaggagcacaaacattccagatccaggttaatttttaaaaagcagtcaaaagtccaagtggcccttggcagcatttactctctctgtttgctctggttaataatctcaggagcacaaacattccagatccggcgcgccagggctggaagctacctttgacatcatttcctctgcgaatgcatgtataatttctacagaacctattagaaaggatcacccagcctctgcttttgtacaactttcccttaaaaaactgccaattccactgctgtttggcccaatagtgagaactttttcctgctgcctcttggtgcttttgcctatggcccctattctgcctgctgaagacactcttgccagcatggacttaaacccctccagctctgacaatcctctttctcttttgttttacatgaagggtctggcagccaaagcaatcactcaaagttcaaaccttatcattttttgctttgttcctcttggccttggttttgtacatcagctttgaaaataccatcccagggttaatgctggggttaatttataactaagagtgctctagttttgcaatacaggacatgctataaaaatggaaagatgttgctttctgagagactgcagaagttggtcgtgaggcactgggcaggtaagtatcaaggttacaagacaggtttaaggagaccaatagaaactgggcttgtcgagacagagaagactcttgcgtttctgataggcacctattggtcttactgacatccactttgcctttctctccacagggcaatccggtactgttggtaaagccacc

SEQ ID NO: 436-437 - skipped (2 entries)

SEQ ID NO: 438 - DNA, 290 bp, synthetic construct
  source 1..290: mol_type = other DNA
tcagatcgcctggagacgccatccacgctgttttgacctccatagaagacaccgggaccgatccagcctccgcggccgggaacggtgcattggaacgcggattccccgtgccaagagtgacgtaagtaccgcctatagactctataggcacacccctttggctcttatgcatgaacggtggagggcagtgtagtctgagcagtactcgttgctgccgcgcgcgccaccagacataatagctgacagactaacagactgttcctttccatgggtcttttctgcaggccacc

SEQ ID NO: 439 - DNA, 544 bp, synthetic construct
  source 1..544: mol_type = other DNA
tgaaatgcctgccatatattagtgccctgaagtccaaaggtagaggaaccgagtgtttaaaaattactgtggctgtggagtcaacatgatgtaaaaaaacaaacatttggataacaccaagaagccagatatggttgaaatgttgactggttgacaaaaataatttgggttgcttaatggtgcacaaaggtaatgcaaaaaggttaatttttaaaaagcagtcaaaagtccaagtggcccttggcagcatttactctctctgtttgctctggttaataatctcaggagcacaaacattccggcccgggaggcgccctttggaccttttgcaatcctggcgcactgaacccttgacccctgccctgcagcccccgcagcttgctgtttgcccactctatttgcccagccccagccctggagagtcctttagcagggcaaagtgcaacataggcagaccttaagggatgactcagtaacagataagctttgtgtgcctgcagggcatataaaacaggggcaaggcacagactcatagcagagcaat

SEQ ID NO: 440 - DNA, 275 bp, synthetic construct
  source 1..275: mol_type = other DNA
aggttaatttttaaaaagcagtcaaaagtccaagtggcccttggcagcatttactctctctgtttgctctggttaataatctcaggagcacaaacattccccctgttcaaacatgtcctaatactctgtctctgcaagggtcatcagtagttttccatcttactcaacatcctcccagtgagtcatatgtttgctcactgaaggttactagttaacaggcatcccttaaacaggatataaaaggacttcagcaggactgctcgaaacatcccact

SEQ ID NO: 441 - DNA, 350 bp, synthetic construct
  source 1..350: mol_type = other DNA
aggttaatttttaaaaagcagtcaaaagtccaagtggcccttggcagcatttactctctctgtttgctctggttaataatctcaggagcacaaacattcctgtaccggcccgggaggcgccctttggaccttttgcaatcctggcgcactgaacccttgacccctgccctgcagcccccgcagcttgctgtttgcccactctatttgcccagccccagccctggagagtcctttagcagggcaaagtgcaacataggcagaccttaagggatgactcagtaacagataagctttgtgtgcctgcagggcatataaaacaggggcaaggcacagactcatagcagagcaat

SEQ ID NO: 442 - DNA, 85 bp, synthetic construct
  source 1..85: mol_type = other DNA
ctagccctaaggtaagttggcgccgtttaagggatggttggttggtggggtattaatgtttaattaccttttttacaggcctgaa

SEQ ID NO: 443 - DNA, 441 bp, synthetic construct
  source 1..441: mol_type = other DNA
gtacacatattgaccaaatcagggtaattttgcatttgtaattttaaaaaatgctttcttcttttaatatacttttttgtttatcttatttctaatactttccctaatctctttctttcagggcaataatgatacaatgtatcatgcctctttgcaccattctaaagaataacagtgataatttctgggttaaggcaatagcaatatttctgcatataaatatttctgcatataaattgtaactgatgtaagaggtttcatattgctaatagcagctacaatccagctaccattctgcttttattttctggttgggataaggctggattattctgagtccaagctaggcccttttgctaatcttgttcatacctcttatcttcctcccacagctcctgggcaacctgctggtctctctgctggcccatcactttggcaaag

SEQ ID NO: 444 - DNA, 179 bp, synthetic construct
  source 1..179: mol_type = other DNA
tactagcagctacaatccagctaccattctgcttttattttatggttgggataaggctggattattctgagtccaagctaggcccttttgctaatcatgttcatacctcttatcttcctcccacagctcctgggcaacgtgctggtctgtgtgctggcccatcactttggcaaagaatt

SEQ ID NO: 445 - DNA, 818 bp, synthetic construct
  source 1..818: mol_type = other DNA
acttggtgagtagcgggctgctgggctggccggggctttcgtggccgccgggccgctcggtgggacggaagcgtgtggagagaccgccaagggctgtagtctgggtccgcgagcaaggttgccctgaactgggggttggggggagcgcagcaaaatggcggctgttcccgagtcttgaatggaagacgcttgtgaggcgggctgtgaggtcgttgaaacaaggtggggggcatggtgggcggcaagaacccaaggtcttgaggccttcgctaatgcgggaaagctcttattcgggtgagatgggctggggcaccatctggggaccctgacgtgaagtttgtcactgactggagaactcggtttgtcgtctgttgcgggggcggcagttatgcggtgccgttgggcagtgcacccgtacctttgggagcgcgcgccctcgtcgtgtcgtgacgtcacccgttctgttggcttataatgcagggtggggccacctgccggtaggtgtgcggtaggcttttctccgtcgcaggacgcagggttcgggcctagggtaggctctcctgaatcgacaggcgccggacctctggtgaggggagggataagtgaggcgtcagtttctttggtcggttttatgtacctatcttcttaagtagctgaagctccggttttgaactatgcgctcggggttggcgagtgtgttttgtgaagttttttaggcaccttttgaaatgtaatcatttgggtcaatatgtaattttcagtgttagactagtaaattgtccgctaaattctggccgtttttggcttttttgttagac

SEQ ID NO: 446 - DNA, 173 bp, synthetic construct
  source 1..173: mol_type = other DNA
caagagtgacgtaagtaccgcctatagactctataggcacacccctttggctcttatgcatgaacggtggagggcagtgtagtctgagcagtactcgttgctgccgcgcgcgccaccagacataatagctgacagactaacagactgttcctttccatgggtcttttctgcag

SEQ ID NO: 447 - skipped

SEQ ID NO: 448 - DNA, 145 bp, synthetic construct; identical to SEQ ID NO: 105
  source 1..145: mol_type = other DNA

SEQ ID NO: 449 - DNA, 136 bp, synthetic construct
  source 1..136: mol_type = other DNA
aggaacccctagtgatggagttggccactccctctctgcgcgctcgctcgctcactgaggccgggcgaccaaaggtcgcccgacgcccgggctttgcccgggcggcctcagtgagcgagcgagcgcgcagagaggg

SEQ ID NO: 450 - DNA, 76 bp, synthetic construct
  source 1..76: mol_type = other DNA
gggcatataaaacaggggcaaggcacagactcatagcagagcaatcaccaccaagcctggaataactgcagccacc

SEQ ID NO: 451 - DNA, 4439 bp, synthetic construct
  source 1..4439: mol_type = other DNA
ctgcgcgctcgctcgctcactgaggccgcccgggcaaagcccgggcgtcgggcgacctttggtcgcccggcctcagtgagcgagcgagcgcgcagagagggagtggccaactccatcactaggggttcctggaggggtggagtcgtgacgtgaattacgtcatagggttagggaggtcggccgctctaggagttaatttttaaaaagcagtcaaaagtccaagtgcccttgcgagcatttactctctctgtttgctctggttaataatctcaggagcacaaacattccttactagttctaggagttaatttttaaaaagcagtcaaaagtccaagtgcccttgcgagcatttactctctctgtttgctctggttaataatctcaggagcacaaacattccttactagttctagagcggccgccagtgtgctggaattcggcttttttagggctggaagctacctttgacatcatttcctctgcgaatgcatgtataatttctacagaacctattagaaaggatcacccagcctctgcttttgtacaactttcccttaaaaaactgccaatcccactgctgtttggcccaatagtgagaactttttcctgctgcctcttggtgcttttgcctatggcccctattctgcctgctgaagacactcttgccagcatggacttaaacccctccagctctgacaatcctctttctcttttgttttacatgaagggtctggcagccaaagcaatcactcaaagttcaaaccttatcattttttgctttgttcctcttggccttggttttgtacatcagctttgaaaataccatcccagggttaatgctggggttaatttataactgagagtgctctagttctgcaatacaggacatgctataaaaatggaaagatgttgctttctgagagatcagcttacatgtggtaccgagctcggatccactagtaacggccgccagtgtgctggaattcggctttccaggccatctccaaccatgggagtgaggcacccgccctgctcccaccggctcctggccgtctgcgccctcgtgtccttggcaaccgctgcactcctggggcacatcctactccatgatttcctgctggttccccgagagctgagtggctcctccccagtcctggaggagactcacccagctcaccagcagggagccagcagaccagggccccgggatgcccaggcacaccccggccgtcccagagcagtgcccacacagtgcgacgtcccccccaacagccgcttcgattgcgcccctgacaaggccatcacccaggaacagtgcgaggcccgcggctgctgctacatccctgcaaagcaggggctgcagggagcccagatggggcagccctggtgcttcttcccacccagctaccccagctacaagctggagaacctgagctcctctgaaatgggctacacggccaccctgacccgtaccacccccaccttcttccccaaggacatcctgaccctgcggctggacgtgatgatggagactgagaaccgcctccacttcacgatcaaagatccagctaacaggcgctacgaggtgcccttggagaccccgcgtgtccacagccgggcaccgtccccactctacagcgtggagttctccgaggagcccttcggggtgatcgtgcaccggcagctggacggccgcgtgctgctgaacacgacggtggcgcccctgttctttgcggaccagttccttcagctgtccacctcgctgccctcgcagtatatcacaggcctcgccgagcacctcagtcccctgatgctcagcaccagctggaccaggatcaccctgtggaaccgggaccttgcgcccacgcccggtgcgaacctctacgggtctcaccctttctacctggcgctggaggacggcgggtcggcacacggggtgttcctgctaaacagcaatgccatggatgtggtcctgcagccgagccctgcccttagctggaggtcgacaggtgggatcctggatgtctacatcttcctgggcccagagcccaagagcgtggtgcagcagtacctggacgttgtgggatacccgttcatgccgccatactggggcctgggcttccacctgtgccgctggggctactcctccaccgctatcacccgccaggtggtggagaacatgaccagggcccacttccccctggacgtccaatggaacgacctggactacatggactcccggagggacttcacgttcaacaaggatggcttccgggacttcccggccatggtgcaggagctgcaccagggcggccggcgctacatgatgatcgtggatcctgccatcagcagctcgggccctgccgggagctacaggccctacgacgagggtctgcggaggggggttttcatcaccaacgagaccggccagccgctgattgggaaggtatggcccgggtccactgccttccccgacttcaccaaccccacagccctggcctggtgggaggacatggtggctgagttccatgaccaggtgcccttcgacggcatgtggattgacatgaacgagccttccaacttcatcagaggctctgaggacggctgccccaacaatgagctggagaacccaccctacgtgcctggggtggttggggggaccctccaggcggccaccatctgtgcctccagccaccagtttctctccacacactacaacctgcacaacctctacggcctgaccgaagccatcgcctcccacagggcgctggtgaaggctcgggggacacgcccatttgtgatctcccgctcgacctttgctggccacggccgatacgccggccactggacgggggacgtgtggagctcctgggagcagctcgcctcctccgtgccagaaatcctgcagtttaacctgctgggggtgcctctggtcggggccgacgtctgcggcttcctgggcaacacctcagaggagctgtgtgtgcgctggacccagctgggggccttctaccccttcatgcggaaccacaacagcctgctcagtctgccccaggagccgtacagcttcagcgagccggcccagcaggccatgaggaaggccctcaccctgcgctacgcactcctcccccacctctacacactgttccaccaggcccacgtcgcgggggagaccgtggcccggcccctcttcctggagttccccaaggactctagcacctggactgtggaccaccagctcctgtggggggaggccctgctcatcaccccagtgctccaggccgggaaggccgaagtgactggctacttccccttgggcacatggtacgacctgcagacggtgccaatagaggcccttggcagcctcccacccccacctgcagctccccgtgagccagccatccacagcgaggggcagtgggtgacgctgccggcccccctggacaccatcaacgtccacctccgggctgggtacatcatccccctgcagggccctggcctcacaaccacagagtcccgccagcagcccatggccctggctgtggccctgaccaagggtggagaggcccgaggggagctgttctgggacgatggagagagcctggaagtgctggagcgaggggcctacacacaggtcatcttcctggccaggaataacacgatcgtgaatgagctggtacgtgtgaccagtgagggagctggcctgcagctgcagaaggtgactgtcctgggcgtggccacggcgccccagcaggtcctctccaacggtgtccctgtctccaacttcacctacagccccgacaccaaggtcctggacatctgtgtctcgctgttgatgggagagcagtttctcgtcagctggtgttagccgggcggagtgtgttagtctctccagagggaggctggttccccagggaagcagagcctgtgtgcgggcagcagctgtgtgcgggcctgggggttgttaagtgcaattatttttaataaaaggggcatttggaaaaaaaaaaaaaaggtagcagtcgacagatgaattctgcagatctgtggcttctagctgcccgggtggcatccctgtgacccctccccagtgcctctcctggccctggaagttgccactccagtgcccaccagccttgtcctaataaaattaagttgcatcattttgtctgactaggtgtccttctataatattatggggtggaggggggtggtatggagcaaggggcaagttgggaagacaacctgagttgttgggattccaggcatcgagtagataagtagcatggcgggttaatcattaactacaaggaacccctagtgatggagttggccactccctctctgcgcgctcgctcgctcactgaggccgggcgaccaaaggtcgcccgacgcccgggctttgcccgggcggcctcagtgagcgagcgagcgcgcag

SEQ ID NO: 452 - protein, 736 aa, Adeno-associated virus 3
MAADGYLPDWLEDNLSEGIREWWALKPGVPQPKANQQHQDNRRGLVLPGYKYLGPGNGLDKGEPVNEADAAALEHDKAYDQQLKAGDNPYLKYNHADAEFQERLQEDTSFGGNLGRAVFQAKKRILEPLGLVEEAAKTAPGKKRPVDQSPQEPDSSSGVGKSGKQPARKRLNFGQTGDSESVPDPQPLGEPPAAPTSLGSNTMASGGGAPMADNNEGADGVGNSSGNWHCDSQWLGDRVITTSTRTWALPTYNNHLYKQISSQSGASNDNHYFGYSTPWGYFDFNRFHCHFSPRDWQRLINNNWGFRPKKLSFKLFNIQVKEVTQNDGTTTIANNLTSTVQVFTDSEYQLPYVLGSAHQGCLPPFPADVFMVPQYGYLTLNNGSQAVGRSSFYCLEYFPSQMLRTGNNFQFSYTFEDVPFHSSYAHSQSLDRLMNPLIDQYLYYLNRTQGTTSGTTNQSRLLFSQAGPQSMSLQARNWLPGPCYRQQRLSKTANDNNNSNFPWTAASKYHLNGRDSLVNPGPAMASHKDDEEKFFPMHGNLIFGKEGTTASNAELDNVMITDEEEIRTTNPVATEQYGTVANNLQSSNTAPTTRTVNDQGALPGMVWQDRDVYLQGPIWAKIPHTDGHFHPSPLMGGFGLKHPPPQIMIKNTPVPANPPTTFSPAKFASFITQYSTGQVSVEIEWELQKENSKRWNPEIQYTSNYNKSVNVDFTVDTNGVYSEPRPIGTRYLTRNL

SEQ ID NO: 453 - DNA, 2208 bp, Adeno-associated virus 3
  source 1..2208: mol_type = genomic DNA
atggctgctgacggttatcttccagattggctcgaggacaacctttctgaaggcattcgtgagtggtgggctctgaaacctggagtccctcaacccaaagcgaaccaacaacaccaggacaaccgtcggggtcttgtgcttccgggttacaaatacctcggacccggtaacggactcgacaaaggagagccggtcaacgaggcggacgcggcagccctcgaacacgacaaagcttacgaccagcagctcaaggccggtgacaacccgtacctcaagtacaaccacgccgacgccgagtttcaggagcgtcttcaagaagatacgtcttttgggggcaaccttggcagagcagtcttccaggccaaaaagaggatccttgagcctcttggtctggttgaggaagcagctaaaacggctcctggaaagaagaggcctgtagatcagtctcctcaggaaccggactcatcatctggtgttggcaaatcgggcaaacagcctgccagaaaaagactaaatttcggtcagactggcgactcagagtcagtcccagaccctcaacctctcggagaaccaccagcagcccccacaagtttgggatctaatacaatggcttcaggcggtggcgcaccaatggcagacaataacgagggtgccgatggagtgggtaattcctcaggaaattggcattgcgattcccaatggctgggcgacagagtcatcaccaccagcaccagaacctgggccctgcccacttacaacaaccatctctacaagcaaatctccagccaatcagatgcttcaaacgacaaccactactttggctacagcaccccttgggggtattttgactttaacagattccactgccacttctcaccacgtgactggcagcgactcattaacaacaactggggattccggcccaagaaactcagcttcaagctcttcaacatccaagttaaagaggtcacgcagaacgatggcacgacgactattgccaataaccttaccagcacggttcaagtgtttacggactcggagtatcagctcccgtacgtgctcgggtcggcgcaccaaggctgtctcccgccgtttccagcggacgtcttcatggtccctcagtatggatacctcaccctgaacaacggaagtcaagcggtgggacgctcatccttttactgcctggagtacttcccttcgcagatgctaaggactggaaataacttccaattcagctataccttcgaggatgtaccttttcacagcagctacgctcacagccagagtttggatcgcttgatgaatcctcttattgatcagtatctgtactacctgaacagaacgcaaggaacaacctctggaacaaccaaccaatcacggctgctttttagccaggctgggcctcagtctatgtctttgcaggccagaaattggctacctgggccctgctaccggcaacagagactttcaaagactgctaacgacaacaacaacagtaactttccttggacagcggccagcaaatatcatctcaatggccgcgactcgctggtgaatccaggaccagctatggccagtcacaaggacgatgaagaaaaatttttccctatgcacggcaatctaatatttggcaaagaagggacaacggcaagtaacgcagaattagataatgtaatgattacggatgaagaagagattcgtaccaccaatcctgtggcaacagagcagtatggaactgtggcaaataacttgcagagctcaaatacagctcccacgactagaactgtcaatgatcagggggccttacctggcatggtgtggcaagatcgtgacgtgtaccttcaaggacctatctgggcaaagattcctcacacggatggacactttcatccttctcctctgatgggaggctttggactgaaacatccgcctcctcaaatcatgatcaaaaatactccggtaccggcaaatcctccgacgactttcagcccggccaagtttgcttcatttatcactcagtactccactggacaggtcagcgtggaaattgagtgggagctacagaaagaaaacagcaaacgttggaatccagagattcagtacacttccaactacaacaagtctgttaatgtggactttactgtagacactaatggtgtttatagtgaacctcgccctattggaacccggtatctcacacgaaacttg

SEQ ID NO: 454 - protein, 736 aa, Adeno-associated virus 3
MAADGYLPDWLEDNLSEGIREWWALKPGVPQPKANQQHQDNRRGLVLPGYKYLGPGNGLDKGEPVNEADAAALEHDKAYDQQLKAGDNPYLKYNHADAEFQERLQEDTSFGGNLGRAVFQAKKRILEPLGLVEEAAKTAPGKKRPVDQSPQEPDSSSGVGKSGKQPARKRLNFGQTGDSESVPDPQPLGEPPAAPTSLGSNTMASGGGAPMADNNEGADGVGNSSGNWHCDSQWLGDRVITTSTRTWALPTYNNHLYKQISSQSDASNDNHYFGYSTPWGYFDFNRFHCHFSPRDWQRLINNNWGFRPKKLSFKLFNIQVKEVTQNDGTTTIANNLTSTVQVFTDSEYQLPYVLGSAHQGCLPPFPADVFMVPQYGYLTLNNGSQAVGRSSFYCLEYFPSQMLRTGNNFQFSYTFEDVPFHSSYAHSQSLDRLMNPLIDQYLYYLNRTQGTTSGTTNQSRLLFSQAGPQSMSLQARNWLPGPCYRQQRLSKTANDNNNSNFPWTAASKYHLNGRDSLVNPGPAMASHKDDEEKFFPMHGNLIFGKEGTTASNAELDNVMITDEEEIRTTNPVATEQYGTVANNLQSSNTAPTTRTVNDQGALPGMVWQDRDVYLQGPIWAKIPHTDGHFHPSPLMGGFGLKHPPPQIMIKNTPVPANPPTTFSPAKFASFITQYSTGQVSVEIEWELQKENSKRWNPEIQYTSNYNKSVNVDFTVDTNGVYSEPRPIGTRYLTRNL

SEQ ID NO: 455 - DNA, 2208 bp, Adeno-associated virus 3
  source 1..2208: mol_type = genomic DNA
atggctgctgacggttatcttccagattggctcgaggacaacctttctgaaggcattcgtgagtggtgggctctgaaacctggagtccctcaacccaaagcgaaccaacaacaccaggacaaccgtcggggtcttgtgcttccgggttacaaatacctcggacccggtaacggactcgacaaaggagagccggtcaacgaggcggacgcggcagccctcgaacacgacaaagcttacgaccagcagctcaaggccggtgacaacccgtacctcaagtacaaccacgccgacgccgagtttcaggagcgtcttcaagaagatacgtcttttgggggcaaccttggcagagcagtcttccaggccaaaaagaggatccttgagcctcttggtctggttgaggaagcagctaaaacggctcctggaaagaagaggcctgtagatcagtctcctcaggaaccggactcatcatctggtgttggcaaatcgggcaaacagcctgccagaaaaagactaaatttcggtcagactggcgactcagagtcagtcccagaccctcaacctctcggagaaccaccagcagcccccacaagtttgggatctaatacaatggcttcaggcggtggcgcaccaatggcagacaataacgagggtgccgatggagtgggtaattcctcaggaaattggcattgcgattcccaatggctgggcgacagagtcatcaccaccagcaccagaacctgggccctgcccacttacaacaaccatctctacaagcaaatctccagccaatcagatgcttcaaacgacaaccactactttggctacagcaccccttgggggtattttgactttaacagattccactgccacttctcaccacgtgactggcagcgactcattaacaacaactggggattccggcccaagaaactcagcttcaagctcttcaacatccaagttaaagaggtcacgcagaacgatggcacgacgactattgccaataaccttaccagcacggttcaagtgtttacggactcggagtatcagctcccgtacgtgctcgggtcggcgcaccaaggctgtctcccgccgtttccagcggacgtcttcatggtccctcagtatggatacctcaccctgaacaacggaagtcaagcggtgggacgctcatccttttactgcctggagtacttcccttcgcagatgctaaggactggaaataacttccaattcagctataccttcgaggatgtaccttttcacagcagctacgctcacagccagagtttggatcgcttgatgaatcctcttattgatcagtatctgtactacctgaacagaacgcaaggaacaacctctggaacaaccaaccaatcacggctgctttttagccaggctgggcctcagtctatgtctttgcaggccagaaattggctacctgggccctgctaccggcaacagagactttcaaaggtagctaacgacaacaacaacagtaactttccttggacagcggccagcaaatatcatctcaatggccgcgactcgctggtgaatccaggaccagctatggccagtcacaaggacgatgaagaaaaatttttccctatgcacggcaatctaatatttggcaaagaagggacaacggcaagtaacgcagaattagataatgtaatgattacggatgaagaagagattcgtaccaccaatcctgtggcaacagagcagtatggaactgtggcaaataacttgcagagctcaaatacagctcccacgactagaactgtcaatgatcagggggccttacctggcatggtgtggcaagatcgtgacgtgtaccttcaaggacctatctgggcaaagattcctcacacggatggacactttcatccttctcctctgatgggaggctttggactgaaacatccgcctcctcaaatcatgatcaaaaatactccggtaccggcaaatcctccgacgactttcgtaccggccaagtttgcttcatttatcactcagtactccactggacaggtcagcgtggaaattgagtgggagctacagaaagaaaacagcaaacgttggaatccagagattcagtacacttccaactacaacaagtctgttaatgtggactttactgtagacactaatggtgtttatagtgaacctcgccctattggaacccggtatctcacacgaaacttg

SEQ ID NO: 456 - protein, 736 aa, Adeno-associated virus 3
MAADGYLPDWLEDNLSEGIREWWALKPGVPQPKANQQHQDNRRGLVLPGYKYLGPGNGLDKGEPVNEADAAALEHDKAYDQQLKAGDNPYLKYNHADAEFQERLQEDTSFGGNLGRAVFQAKKRILEPLGLVEEAAKTAPGKKRPVDQSPQEPDSSSGVGKSGKQPARKRLNFGQTGDSESVPDPQPLGEPPAAPTSLGSNTMASGGGAPMADNNEGADGVGNSSGNWHCDSQWLGDRVITTSTRTWALPTYNNHLYKQISSQSGASNDNHYFGYSTPWGYFDFNRFHCHFSPRDWQRLINNNWGFRPKKLSFKLFNIQVKEVTQNDGTTTIANNLTSTVQVFTDSEYQLPYVLGSAHQGCLPPFPADVFMVPQYGYLTLNNGSQAVGRSSFYCLEYFPSQMLRTGNNFQFSYTFEDVPFHSSYAHSQSLDRLMNPLIDQYLYYLNRTQGTTSGTTNQSRLLFSQAGPQSMSLQARNWLPGPCYRQQRLSKVANDNNNSNFPWTAASKYHLNGRDSLVNPGPAMASHKDDEEKFFPMHGNLIFGKEGTTASNAELDNVMITDEEEIRTTNPVATEQYGTVANNLQSSNTAPTTRTVNDQGALPGMVWQDRDVYLQGPIWAKIPHTDGHFHPSPLMGGFGLKHPPPQIMIKNTPVPANPPTTFVPAKFASFITQYSTGQVSVEIEWELQKENSKRWNPEIQYTSNYNKSVNVDFTVDTNGVYSEPRPIGTRYLTRNL

SEQ ID NO: 457 - DNA, 2134 bp, Adeno-associated virus 3
  source 1..2134: mol_type = genomic DNA
gaaacctggagtccctcaacccaaagcgaaccaacaacaccaggacaaccgtcggggtcttgtgcttccgggttacaaatacctcggacccggtaacggactcgacaaaggagagccggtcaacgaggcggacgcggcagccctcgaacacgacaaagcttacgaccagcagctcaaggccggtgacaacccgtacctcaagtacaaccacgccgacgccgagtttcaggagcgtcttcaagaagatacgtcttttgggggcaaccttggcagagcagtcttccaggccaaaaagaggatccttgagcctcttggtctggttgaggaagcagctaaaacggctcctggaaagaagaggcctgtagatcagtctcctcaggaaccggactcatcatctggtgttggcaaatcgggcaaacagcctgccagaaaaagactaaatttcggtcagactggcgactcagagtcagtcccagaccctcaacctctcggagaaccaccagcagcccccacaagtttgggatctaatacaatggcttcaggcggtggcgcaccaatggcagacaataacgagggtgccgatggagtgggtaattcctcaggaaattggcattgcgattcccaatggctgggcgacagagtcatcaccaccagcaccagaacctgggccctgcccacttacaacaaccatctctacaagcaaatctccagccaatcaggagcttcaaacgacaaccactactttggctacagcaccccttgggggtattttgactttaacagattccactgccacttctcaccacgtgactggcagcgactcattaacaacaactggggattccggcccaagaaactcagcttcaagctcttcaacatccaagttaaagaggtcacgcagaacgatggcacgacgactattgccaataaccttaccagcacggttcaagtgtttacggactcggagtatcagctcccgtacgtgctcgggtcggcgcaccaaggctgtctcccgccgtttccagcggacgtcttcatggtccctcagtatggatacctcaccctgaacaacggaagtcaagcggtgggacgctcatccttttactgcctggagtacttcccttcgcagatgctaaggactggaaataacttccaattcagctataccttcgaggatgtaccttttcacagcagctacgctcacagccagagtttggatcgcttgatgaatcctcttattgatcagtatctgtactacctgaacagaacgcaaggaacaacctctggaacaaccaaccaatcacggctgctttttagccaggctgggcctcagtctatgtctttgcaggccagaaattggctacctgggccctgctaccggcaacagagactttcaaagactgctaacgacaacaacaacagtaactttccttggacagcggccagcaaatatcatctcaatggccgcgactcgctggtgaatccaggaccagctatggccagtcacaaggacgatgaagaaaaatttttccctatgcacggcaatctaatatttggcaaagaagggacaacggcaagtaacgcagaattagataatgtaatgattacggatgaagaagagattcgtaccaccaatcctgtggcaacagagcagtatggaactgtggcaaataacttgcagagctcaaatacagctcccacgactagaactgtcaatgatcagggggccttacctggcatggtgtggcaagatcgtgacgtgtaccttcaaggacctatctgggcaaagattcctcacacggatggacactttcatccttctcctctgatgggaggctttggactgaaacatccgcctcctcaaatcatgatcaaaaatactccggtaccggcaaatcctccgacgactttcagcccggccaagtttgcttcatttatcactcagtactccactggacaggtcagcgtggaaattgagtgggagctacagaaagaaaacagcaaacgttggaatccagagattcagtacacttccaactacaacaagtctgttaatgtggactttactgtagacactaatggtgtttatagtgaacctcgccctattggaacccggtatctcacacgaaacttg

SEQ ID NO: 458 - protein, 736 aa, Adeno-associated virus 3
MAADGYLPDWLEDNLSEGIREWWALKPGVPQPKANQQHQDNRRGLVLPGYKYLGPGNGLDKGEPVNEADAAALEHDKAYDQQLKAGDNPYLKYNHADAEFQERLQEDTSFGGNLGRAVFQAKKRILEPLGLVEEAAKTAPGKKRPVDQSPQEPDSSSGVGKSGKQPARKRLNFGQTGDSESVPDPQPLGEPPAAPTSLGSNTMASGGGAPMADNNEGADGVGNSSGNWHCDSQWLGDRVITTSTRTWALPTYNNHLYKQISSQSDASNDNHYFGYSTPWGYFDFNRFHCHFSPRDWQRLINNNWGFRPKKLSFKLFNIQVKEVTQNDGTTTIANNLTSTVQVFTDSEYQLPYVLGSAHQGCLPPFPADVFMVPQYGYLTLNNGSQAVGRSSFYCLEYFPSQMLRTGNNFQFSYTFEDVPFHSSYAHSQSLDRLMNPLIDQYLYYLNRTQGTTSGTTNQSRLLFSQAGPQSMSLQARNWLPGPCYRQQRLSKTANDNNNSNFPWTAASKYHLNGRDSLVNPGPAMASHKDDEEKFFPMHGNLIFGKEGTAASNAELDNVMITDEEEIRTTNPVATEQYGTVANNLQSSNTAPTTRTVNDQGALPGMVWQDRDVYLQGPIWAKIPHTDGHFHPSPLMGGFGLKHPPPQIMIKNTPVPANPPTTFSPAKFASFITQYSTGQVSVEIEWELQKENSKRWNPEIQYTSNYNKSVNVDFTVDTNGVYSEPRPIGTRYLTRNL

SEQ ID NO: 459 - DNA, 2208 bp, Adeno-associated virus 3
  source 1..2208: mol_type = genomic DNA
atggctgctgacggttatcttccagattggctcgaggacaacctttctgaaggcattcgtgagtggtgggctctgaaacctggagtccctcaacccaaagcgaaccaacaacaccaggacaaccgtcggggtcttgtgcttccgggttacaaatacctcggacccggtaacggactcgacaaaggagagccggtcaacgaggcggacgcggcagccctcgaacacgacaaagcttacgaccagcagctcaaggccggtgacaacccgtacctcaagtacaaccacgccgacgccgagtttcaggagcgtcttcaagaagatacgtcttttgggggcaaccttggcagagcagtcttccaggccaaaaagaggatccttgagcctcttggtctggttgaggaagcagctaaaacggctcctggaaagaagaggcctgtagatcagtctcctcaggaaccggactcatcatctggtgttggcaaatcgggcaaacagcctgccagaaaaagactaaatttcggtcagactggcgactcagagtcagtcccagaccctcaacctctcggagaaccaccagcagcccccacaagtttgggatctaatacaatggcttcaggcggtggcgcaccaatggcagacaataacgagggtgccgatggagtgggtaattcctcaggaaattggcattgcgattcccaatggctgggcgacagagtcatcaccaccagcaccagaacctgggccctgcccacttacaacaaccatctctacaagcaaatctccagccaatcaggagcttcaaacgacaaccactactttggctacagcaccccttgggggtattttgactttaacagattccactgccacttctcaccacgtgactggcagcgactcattaacaacaactggggattccggcccaagaaactcagcttcaagctcttcaacatccaagttaaagaggtcacgcagaacgatggcacgacgactattgccaataaccttaccagcacggttcaagtgtttacggactcggagtatcagctcccgtacgtgctcgggtcggcgcaccaaggctgtctcccgccgtttccagcggacgtcttcatggtccctcagtatggatacctcaccctgaacaacggaagtcaagcggtgggacgctcatccttttactgcctggagtacttcccttcgcagatgctaaggactggaaataacttccaattcagctataccttcgaggatgtaccttttcacagcagctacgctcacagccagagtttggatcgcttgatgaatcctcttattgatcagtatctgtactacctgaacagaacgcaaggaacaacctctggaacaaccaaccaatcacggctgctttttagccaggctgggcctcagtctatgtctttgcaggccagaaattggctacctgggccctgctaccggcaacagagactttcaaagactgctaacgacaacaacaacagtaactttccttggacagcggccagcaaatatcatctcaatggccgcgactcgctggtgaatccaggaccagctatggccagtcacaaggacgatgaagaaaaatttttccctatgcacggcaatctaatatttggcaaagaagggacaacggcaagtaacgcagaattagataatgtaatgattacggatgaagaagagattcgtaccaccaatcctgtggcaacagagcagtatggaactgtggcaaataacttgcagagctcaaatacagctcccacgactagaactgtcaatgatcagggggccttacctggcatggtgtggcaagatcgtgacgtgtaccttcaaggacctatctgggcaaagattcctcacacggatggacactttcatccttctcctctgatgggaggctttggactgaaacatccgcctcctcaaatcatgatcaaaaatactccggtaccggcaaatcctccgacgactttcagcccggccaagtttgcttcatttatcactcagtactccactggacaggtcagcgtggaaattgagtgggagctacagaaagaaaacagcaaacgttggaatccagagattcagtacacttccaactacaacaagtctgttaatgtggactttactgtagacactaatggtgtttatagtgaacctcgccctattggaacccggtatctcacacgaaacttg

SEQ ID NO: 460 - protein, 736 aa, Adeno-associated virus 3
MAADGYLPDWLEDNLSEGIREWWALKPGVPQPKANQQHQDNRRGLVLPGYKYLGPGNGLDKGEPVNEADAAALEHDKAYDQQLKAGDNPYLKYNHADAEFQERLQEDTSFGGNLGRAVFQAKKRILEPLGLVEEAAKTAPGKKRPVDQSPQEPDSSSGVGKSGKQPARKRLNFGQTGDSESVPDPQPLGEPPAAPTSLGSNTMASGGGAPMADNNEGADGVGNSSGNWHCDSQWLGDRVITTSTRTWALPTYNNHLYKQISSQSGASNDNHYFGYSTPWGYFDFNRFHCHFSPRDWQRLINNNWGFRPKKLSFKLFNIQVKEVTQNDGTTTIANNLTSTVQVFTDSEYQLPYVLGSAHQGCLPPFPADVFMVPQYGYLTLNNGSQAVGRSSFYCLEYFPSQMLRTGNNFQFSYTFEDVPFHSSYAHSQSLDRLMNPLIDQYLYYLNRTQGTTSGTTNQSRLLFSQAGPQSMSLQARNWLPGPCYRQQRLSKTANDNNNSNFPWTAASKYHLNGRDSLVNPGPAMASHKDDEEKFFPMHGNLIFGKEGTAASNAELDNVMITDEEEIRTTNPVATEQYGTVANNLQSSNTAPTTRTVNDQGALPGMVWQDRDVYLQGPIWAKIPHTDGHFHPSPLMGGFGLKHPPPQIMIKNTPVPANPPTTFSPAKFASFITQYSTGQVSVEIEWELQKENSKRWNPEIQYTSNYNKSVNVDFTVDTNGVYSEPRPIGTRYLTRNL

SEQ ID NO: 461 - DNA, 2208 bp, Adeno-associated virus 3; identical to SEQ ID NO: 459
  source 1..2208: mol_type = genomic DNA

SEQ ID NO: 462 - protein, 736 aa, Adeno-associated virus 3
MAADGYLPDWLEDNLSEGIREWWALKPGVPQPKANQQHQDNRRGLVLPGYKYLGPGNGLDKGEPVNEADAAALEHDKAYDQQLKAGDNPYLKYNHADAEFQERLQEDTSFGGNLGRAVFQAKKRILEPLGLVEEAAKTAPGKKRPVDQSPQEPDSSSGVGKSGKQPARKRLNFGQTGDSESVPDPQPLGEPPAAPTSLGSNTMASGGGAPMADNNEGADGVGNSSGNWHCDSQWLGDRVITTSTRTWALPTYNNHLYKQISSYSGASNDNHYFGYSTPWGYFDFNRFHCHFSPRDWQRLINNNWGFRPKKLSFKLFNIQVKEVTQNDGTTTIANNLTSTVQVFTDSEYQLPYVLGSAHQGCLPPFPADVFMVPQYGYLTLNNGSQAVGRSSFYCLEYFPSQMLRTGNNFQFSYTFEDVPFHSSYAHSQSLDRLMNPLIDQYLYYLNRTQGTTSGTTNQSRLLFSQAGPQSMSLQARNWLPGPCYRQQRLSKTANDNNNSNFPWTAASKYHLNGRDSLVNPGPAMASHKDDEEKFFPMHGNLIFGKEGTTASNAELDNVMITDEEEIRTTNPVATEQYGTVANNLQSSNTAPTTRTVNDQGALPGMVWQDRDVYLQGPIWAKIPHTDGHFHPSPLMGGFGLKHPPPQIMIKNTPVPANPPTTFSPAKFASFITQYSTGQVSVEIEWELQKENSKRWNPEIQYTSNYNKSVNVDFTVDTNGVYSEPRPIGTRYLTRNL

SEQ ID NO: 463 - DNA, 9834 bp, synthetic construct
  source 1..9834: mol_type = other DNA
ctgcgcgctcgctcgctcactgaggccgcccgggcaaagcccgggcgtcgggcgacctttggtcgcccggcctcagtgagcgagcgagcgcgcagagagggagtggccaactccatcactaggggttcctggaggggtggagtcgtgacgtgaattacgtcatagggttagggaggtcggccgctctaggagttaatttttaaaaagcagtcaaaagtccaagtgcccttgcgagcatttactctctctgtttgctctggttaataatctcaggagcacaaacattccttactagttctaggagttaatttttaaaaagcagtcaaaagtccaagtgcccttgcgagcatttactctctctgtttgctctggttaataatctcaggagcacaaacattccttactagttctagagcggccgccagtgtgctggaattcggcttttttagggctggaagctacctttgacatcatttcctctgcgaatgcatgtataatttctacagaacctattagaaaggatcacccagcctctgcttttgtacaactttcccttaaaaaactgccaatcccactgctgtttggcccaatagtgagaactttttcctgctgcctcttggtgcttttgcctatggcccctattctgcctgctgaagacactcttgccagcatggacttaaacccctccagctctgacaatcctctttctcttttgttttacatgaagggtctggcagccaaagcaatcactcaaagttcaaaccttatcattttttgctttgttcctcttggccttggttttgtacatcagctttgaaaataccatcccagggttaatgctggggttaatttataactgagagtgctctagttctgcaatacaggacatgctataaaaatggaaagatgttgctttctgagagatcagcttacatgtggtaccgagctcggatccactagtaacggccgccagtgtgctggaattcggctttccaggccatctccaaccatgggagtgaggcacccgccctgctcccaccggctcctggccgtctgcgccctcgtgtccttggcaaccgctgcactcctggagtttgggctgagctgggtctttctggtggccctgctgaagggagtccagtgtgagcagcagggagccagcagaccagggccccgggatgcccaggcacaccccggccgtcccagagcagtgcccacacagtgcgacgtcccccccaacagccgcttcgattgcgcccctgacaaggccatcacccaggaacagtgcgaggcccgcggctgctgctacatccctgcaaagcaggggctgcagggagcccagatggggcagccctggtgcttcttcccacccagctaccccagctacaagctggagaacctgagctcctctgaaatgggctacacggccaccctgacccgtaccacccccaccttcttccccaaggacatcctgaccctgcggctggacgtgatgatggagactgagaaccgcctccacttcacgatcaaagatccagctaacaggcgctacgaggtgcccttggagaccccgcgtgtccacagccgggcaccgtccccactctacagcgtggagttctccgaggagcccttcggggtgatcgtgcaccggcagctggacggccgcgtgctgctgaacacgacggtggcgcccctgttctttgcggaccagttccttcagctgtccacctcgctgccctcgcagtatatcacaggcctcgccgagcacctcagtcccctgatgctcagcaccagctggaccaggatcaccctgtggaaccgggaccttgcgcccacgcccggtgcgaacctctacgggtctcaccctttctacctggcgctggaggacggcgggtcggcacacggggtgttcctgctaaacagcaatgccatggatgtggtcctgcagccgagccctgcccttagctggaggtcgacaggtgggatcctggatgtctacatcttcctgggcccagagcccaagagcgtggtgcagcagtacctggacgttgtgggatacccgttcatgccgccatactggggcctgggcttccacctgtgccgctggggctactcctccaccgctatcacccgccaggtggtggagaacatgaccagggcccacttccccctggacgtccaatggaacgacctggactacatggactcccggagggacttcacgttcaacaaggatggcttccgggacttcccggccatggtgcaggagctgcaccagggcggccggcgctacatgatgatcgtggatcctgccatcagcagctcgggccctgccgggagctacaggccctacgacgagggtctgcggaggggggttttcatcaccaacgagaccggccagccgctgattgggaaggtatggcccgggtccactgccttccccgacttcaccaaccccacagccctggcctggtgggaggacatggtggctgagttccatgaccaggtgcccttcgacggcatgtggattgacatgaacgagccttccaacttcatcagaggctctgaggacggctgccccaacaatgagctggagaacccaccctacgtgcctggggtggttggggggaccctccaggcggccaccatctgtgcctccagccaccagtttctctccacacactacaacctgcacaacctctacggcctgaccgaagccatcgcctcccacagggcgctggtgaaggctcgggggacacgcccatttgtgatctcccgctcgacctttgctggccacggccgatacgccggccactggacgggggacgtgtggagctcctgggagcagctcgcctcctccgtgccagaaatcctgcagtttaacctgctgggggtgcctctggtcggggccgacgtctgcggcttcctgggcaacacctcagaggagctgtgtgtgcgctggacccagctgggggccttctaccccttcatgcggaaccacaacagcctgctcagtctgccccaggagccgtacagcttcagcgagccggcccagcaggccatgaggaaggccctcaccctgcgctacgcactcctcccccacctctacacactgttccaccaggcccacgtcgcgggggagaccgtggcccggcccctcttcctggagttccccaaggactctagcacctggactgtggaccaccagctcctgtggggggaggccctgctcatcaccccagtgctccaggccgggaaggccgaagtgactggctacttccccttgggcacatggtacgacctgcagacggtgccaatagaggcccttggcagcctcccacccccacctgcagctccccgtgagccagccatccacagcgaggggcagtgggtgacgctgccggcccccctggacaccatcaacgtccacctccgggctgggtacatcatccccctgcagggccctggcctcacaaccacagagtcccgccagcagcccatggccctggctgtggccctgaccaagggtggagaggcccgaggggagctgttctgggacgatggagagagcctggaagtgctggagcgaggggcctacacacaggtcatcttcctggccaggaataacacgatcgtgaatgagctggtacgtgtgaccagtgagggagctggcctgcagctgcagaaggtgactgtcctgggcgtggccacggcgccccagcaggtcctctccaacggtgtccctgtctccaacttcacctacagccccgacaccaaggtcctggacatctgtgtctcgctgttgatgggagagcagtttctcgtcagctggtgttagccgggcggagtgtgttagtctctccagagggaggctggttccccagggaagcagagcctgtgtgcgggcagcagctgtgtgcgggcctgggggttgttaagtgcaattatttttaataaaaggggcatttggaaaaaaaaaaaaaaggtagcagtcgacagatgaattctgcagatctgtggcttctagctgcccgggtggcatccctgtgacccctccccagtgcctctcctggccctggaagttgccactccagtgcccaccagccttgtcctaataaaattaagttgcatcattttgtctgactaggtgtccttctataatattatggggtggaggggggtggtatggagcaaggggcaagttgggaagacaacctgagttgttgggattccaggcatcgagtagataagtagcatggcgggttaatcattaactacaaggaacccctagtgatggagttggccactccctctctgcgcgctcgctcgctcactgaggccgggcgaccaaaggtcgcccgacgcccgggctttgcccgggcggcctcagtgagcgagcgagcgcgcagagagggacagatccgaagccgggcaaatcagcgcctggcagcagtggcgtctggcggaaaacctcagtgtgacgctccccgccgcgtcccacgcttgttcccggatctgaccaccagcgaaatccgatttttgcaccgagctgggtaataagcgttggcaatttaaccgccagtcaggctttctttcacagtgtggattggcgataaaaaacaactgctgacgccgctgcgcgatcagttcacccgttcaccgctggataacgacttggcgtaagtgaagcgacccgtaagaccctaacgcctgggtcgaacgctggaaggcggcgggccaaaccaggccgaagcagcgttgttgcagttcacggcagatacacttgctgttgcggtgctgattacgaccgctcactcgtggcagcaacaggggaaaaccttatttatcagccggaaaacctaccggattgttggtagtggtcaataggcgattaccgttgtgttgaagtggcgagcgatacaccgcttccggcgcggattggcctgaactgccaactggcgcaggtagcagagcgggtaaactggctcggattagggccgcaagaaaactatcccgaccgccttactgccgcctgttttgaccgctgggatctgccaagtcagacagtatagcccgtacgtcttcccgagcgaaaacggtctgcgctgcgggacgcgcgaattgaatttggcccacaccagtggcgcggcgacttccagttcaatatcagccgctacagtgaacagcaactgttggaaaccagccttcgccaactgctgcacgcggaagaaggcactggctgaatatcgacggtttccagttggggattggtggcgacgactcctggagcccgtcagtatcggcggacttccaactgagcgccggtcgctaccttaccagttggtctggtgtcaaaaagcgtccgcttgagtctagcgatcgcgcgcagatctgtcatgtgagcaaaaggccagcaaaaggccaggaaccgtaaaaaggccgcgttgctggcgtttttccataggctccgcccccctgacgagcatcacaaaaatcgacgctcaagtcagaggtggcgaaacccgacaggactataaagataccaggcgtttccccctggaagctccctcgtgcgctctcctgttccgaccctgccgcttaccggatacctgtccgcctttctcccttcgggaagcgtggcgctttctcatagctcacgctgtaggtatctcagttcggtgtaggtcgttcgctccaagctgggctgtgtgcacgaaccccccgttcagcccgaccgctgcgccttatccggtaactatcgtcttgagtccaacccggtaagacacgacttatcgccactggcagcagccactggtaacaggattagcagagcgaggtatgtaggcggtgctacagagttcttgaagtggtggcctaactacggctacactagaagaacagtatttggtatctgcgctctgctgaagccagttaccttcggaaaaagagttggtagctcttgatccggcaaacaaaccaccgctggtagcggtggtttttttgtttgcaagcagcagattacgcgcagaaaaaaaggatctcaagaagatcctttgatcttttctacggggtctgacgctcagtggaacgaaaactcacgttaagggattttggtcatgagattatcaaaaaggatcttcacctagatccttttcacgtagaaagccagtccgcagaaacggtgctgaccccggatgaatgtcagctactgggctatctggacaagggaaaacgcaagcgcaaagagaaagcaggtagcttgcagtgggcttacatggcgatagctagactgggcggttttatggacagcaagcgaaccggaattgccagctggggcgccctctggtaaggttgggaagccctgcaaagtaaactggatggctttcttgccgccaaggatctgatggcgcaggggatcaagatctgatcaagagacaggatgaggatcgtttcgcatgattgaacaagatggattgcacgcaggttctccggccgcttgggtggagaggctattcggctatgactgggcacaacagacaatcggctgctctgatgccgccgtgttccggctgtcagcgcaggggcgcccggttctttttgtcaagaccgacctgtccggtgccctgaatgaactgcaagacgaggcagcgcggctatcgtggctggccacgacgggcgttccttgcgcagctgtgctcgacgttgtcactgaagcgggaagggactggctgctattgggcgaagtgccggggcaggatctcctgtcatctcaccttgctcctgccgagaaagtatccatcatggctgatgcaatgcggcggctgcatacgcttgatccggctacctgcccattcgaccaccaagcgaaacatcgcatcgagcgagcacgtactcggatggaagccggtcttgtcgatcaggatgatctggacgaagagcatcaggggctcgcgccagccgaactgttcgccaggctcaaggcgagcatgcccgacggcgaggatctcgtcgtgacccatggcgatgcctgcttgccgaatatcatggtggaaaatggccgcttttctggattcatcgactgtggccggctgggtgtggcggaccgctatcaggacatagcgttggctacccgtgatattgctgaagagcttggcggcgaatgggctgaccgcttcctcgtgctttacggtatcgccgctcccgattcgcagcgcatcgccttctatcgccttcttgacgagttcttctgaatttaaagcccaatacgcaaaccgcctctccccgcgcgttggccgaagcggttcaatattttgttaaaattcgcgttaaatttttgttaaatcagctattttttaaccaataggccgaaatcggcaaaatcccttgtaaatcaaaagaatagaccgagatagggttgagtgttgttccagtttggaacaagagtccactattaaagaacgtggactccaacgtcaaagggcgaaaaaccgtctatcagggcgttggcccactacgtgaaccttcaccctaatcaagttttttggggtcgaggtgccgtaaagcactaaatcggaaccctaaagggagcccccgatttagagcttgacggggaaaccggcgaacgtggcgagaaaggaagggaagaaagcgaaaggagcgggcgctagggcgctggcaagtgtagcggtcacgctgcgcgtaaccaccacacccgccgcgctaagcgccgctacagggcgcgtcccttcgccttcaggctgcgtcgagtactgtactgtgagccagagttgcccggcgctctccggctgcggtagttcaggcagttcaatcaactgtttaccttgtggagcgactccagaggcacttcaccgcttgccagcggcttacgatccagcgccacgatccagtgcaggagatcgttatcgctatacggaacaggtattcgctggtcacttcgataaggtttgcccggataaacggaactggaaaaactgctgctggtgttttgcttccgtcagtgctggatcggcgtgcggtcggcaaagaccagaccgttctaacagaactggcgattgttcggcgtatcgccaaaatcaccgccgtaagccgaccacgggttgccgttttcagcaggatttaatcagcgactgatccacccagtcccagacgaagccgccctgtaaacggggatactgacgaaacgcctgccagtatttagcgaaaccgccaagactgttacccaagcgtgggcgtattcgcaaaggatcagcgggcgcgtctctccaggtagcgaaagccttttttgatcgacctttcggcacagccgggaagggctggtcttcaaccacgcgcgcgtacaacgggcaaataatatcggtggccgtggtgtcggctccgccgccttcaactgcaccgggcgggaaggatcgacagatttgatccagcgatacagcgcgtcgtgattagcgccgtggcctgattcaattccccagcgaccagtagatcacactcgggtgattacgattgcgctgcaccagtcgcgttacggttcgctcttcgccggtagccagcgcggatcacggtcagacgattcgttggcacgatccgtgggtttcaatactggcttcaaaccaccactaacaggccgtagcggtcgcacagcgtgtaccacagcggttggttcggataatcgaacagcgcacggcgttaaagttgttctgcttcaacagcaggatattctgcaccttcgtctgctcttcctaacctgaccaagcagaggatctgctcgtgacggttaatcctcgaatcagcaacggcttgccgttcagcagcagcagaccaagttcaatccgcacctcgcggaaaccgacaacgcaggcttctgcttcaatcagcgtgccgtcggcggtgtgcagttcaaccaccgcacgatagagattcgggatttcggcgctccacagtttcgggttttcgacgttcagacgtagtgtgacgcgatctgcaaaccaccacgctcaacgataatttcaccgccgaaaggcgcggtgccgctggcgacctgcgtttcaccctgccagaaagaaactgttacccgtaggtagtcacgcaactcgccgcacactgaacttcagcctccagtacagcgcggctgaaatcgtcttaaagcgagtggcaactggaaatcgctgatttgtgtagtcggtttagcagcaacgagacttcacggaaaatccgctaatccgccacagatcctgatcttccagataactgccgtcactccaacgcagcaccttcaccgcgaggcggttttctccggcgcgtaaaaatcgctcaggtcaaattcagacggcaaacgactgtcctggccgtaaccgacccagcgcccgttgcaccacagattgaaacgccgagtttacgcctcaaaaataattcgcgtctggccttcctgtagccagctttcacaactataatagtgagcgagtaacaacccgtcggattctccgtgggaacaaacggcggattgaccgtatagggataggttacgttggtgtagtagggcgctccgtaaccgtgctactgccagtttgaggggacgacgacagtatcggcctcaggaagatcgcactccagccagctttccggcaccgcttctggtactggaaaccaggcaaagcgcctatcgcctatcaggctgcacaactgttgggaagggcgatctgtgcgggcctcttcgctattacgccagcttgcgaaagggggtagtgctgcaaggcgattaagttgggtaacgccagggttttcccagtcacgacgtggatctgggccactccctct

SEQ ID NO: 464 - DNA, 9834 bp, synthetic construct; identical to SEQ ID NO: 463
  source 1..9834: mol_type = other DNA

SEQ ID NO: 465 - DNA, 12 bp, synthetic construct
  source 1..12: mol_type = other DNA
tgataactcgag

SEQ ID NO: 466 - DNA, 9768 bp, synthetic construct
  source 1..9768: mol_type = other DNA
ctgcgcgctcgctcgctcactgaggccgcccgggcaaagcccgggcgtcgggcgacctttggtcgcccggcctcagtgagcgagcgagcgcgcagagagggagtggccaactccatcactaggggttcctggaggggtggagtcgtgacgtgaattacgtcatagggttagggaggtcggccgctctaggagttaatttttaaaaagcagtcaaaagtccaagtgcccttgcgagcatttactctctctgtttgctctggttaataatctcaggagcacaaacattccttactagttctaggagttaatttttaaaaagcagtcaaaagtccaagtgcccttgcgagcatttactctctctgtttgctctggttaataatctcaggagcacaaacattccttactagttctagagcggccgccagtgtgctggaattcggcttttttagggctggaagctacctttgacatcatttcctctgcgaatgcatgtataatttctacagaacctattagaaaggatcacccagcctctgcttttgtacaactttcccttaaaaaactgccaatcccactgctgtttggcccaatagtgagaactttttcctgctgcctcttggtgcttttgcctatggcccctattctgcctgctgaagacactcttgccagcatggacttaaacccctccagctctgacaatcctctttctcttttgttttacatgaagggtctggcagccaaagcaatcactcaaagttcaaaccttatcattttttgctttgttcctcttggccttggttttgtacatcagctttgaaaataccatcccagggttaatgctggggttaatttataactgagagtgctctagttctgcaatacaggacatgctataaaaatggaaagatgttgctttctgagagatcagcttacatgtggtaccgagctcggatccactagtaacggccgccagtgtgctggaattcggctttccaggccatctccaaccatgggagtgaggcacccgccctgctcccaccggctcctggccgtctgcgccctcgtgtccttggcaaccgctcagcagggagccagcagaccagggccccgggatgcccaggcacaccccggccgtcccagagcagtgcccacacagtgcgacgtcccccccaacagccgcttcgattgcgcccctgacaaggccatcacccaggaacagtgcgaggcccgcggctgctgctacatccctgcaaagcaggggctgcagggagcccagatggggcagccctggtgcttcttcccacccagctaccccagctacaagctggagaacctgagctcctctgaaatgggctacacggccaccctgacccgtaccacccccaccttcttccccaaggacatcctgaccctgcggctggacgtgatgatggagactgagaaccgcctccacttcacgatcaaagatccagctaacaggcgctacgaggtgcccttggagaccccgcgtgtccacagccgggcaccgtccccactctacagcgtggagttctccgaggagcccttcggggtgatcgtgcaccggcagctggacggccgcgtgctgctgaacacgacggtggcgcccctgttctttgcggaccagttccttcagctgtccacctcgctgccctcgcagtatatcacaggcctcgccgagcacctcagtcccctgatgctcagcaccagctggaccaggatcaccctgtggaaccgggaccttgcgcccacgcccggtgcgaacctctacgggtctcaccctttctacctggcgctggaggacggcgggtcggcacacggggtgttcctgctaaacagcaatgccatggatgtggtcctgcagccgagccctgcccttagctggaggtcgacaggtgggatcctggatgtctacatcttcctgggcccagagcccaagagcgtggtgcagcagtacctggacgttgtgggatacccgttcatgccgccatactggggcctgggcttccacctgtgccgctggggctactcctccaccgctatcacccgccaggtggtggagaacatgaccagggcccacttccccctggacgtccaatggaacgacctggactacatggactcccggagggacttcacgttcaacaaggatggcttccgggacttcccggccatggtgcaggagctgcaccagggcggccggcgctacatgatgatcgtggatcctgccatcagcagctcgggccctgccgggagctacaggccctacgacgagggtctgcggaggggggttttcatcaccaacgagaccggccagccgctgattgggaaggtatggcccgggtccactgccttccccgacttcaccaaccccacagccctggcctggtgggaggacatggtggctgagttccatgaccaggtgcccttcgacggcatgtggattgacatgaacgagccttccaacttcatcagaggctctgaggacggctgccccaacaatgagctggagaacccaccctacgtgcctggggtggttggggggaccctccaggcggccaccatctgtgcctccagccaccagtttctctccacacactacaacctgcacaacctctacggcctgaccgaagccatcgcctcccacagggcgctggtgaaggctcgggggacacgcccatttgtgatctcccgctcgacctttgctggccacggccgatacgccggccactggacgggggacgtgtggagctcctgggagcagctcgcctcctccgtgccagaaatcctgcagtttaacctgctgggggtgcctctggtcggggccgacgtctgcggcttcctgggcaacacctcagaggagctgtgtgtgcgctggacccagctgggggccttctaccccttcatgcggaaccacaacagcctgctcagtctgccccaggagccgtacagcttcagcgagccggcccagcaggccatgaggaaggccctcaccctgcgctacgcactcctcccccacctctacacactgttccaccaggcccacgtcgcgggggagaccgtggcccggcccctcttcctggagttccccaaggactctagcacctggactgtggaccaccagctcctgtggggggaggccctgctcatcaccccagtgctccaggccgggaaggccgaagtgactggctacttccccttgggcacatggtacgacctgcagacggtgccaatagaggcccttggcagcctcccacccccacctgcagctccccgtgagccagccatccacagcgaggggcagtgggtgacgctgccggcccccctggacaccatcaacgtccacctccgggctgggtacatcatccccctgcagggccctggcctcacaaccacagagtcccgccagcagcccatggccctggctgtggccctgaccaagggtggagaggcccgaggggagctgttctgggacgatggagagagcctggaagtgctggagcgaggggcctacacacaggtcatcttcctggccaggaataacacgatcgtgaatgagctggtacgtgtgaccagtgagggagctggcctgcagctgcagaaggtgactgtcctgggcgtggccacggcgccccagcaggtcctctccaacggtgtccctgtctccaacttcacctacagccccgacaccaaggtcctggacatctgtgtctcgctgttgatgggagagcagtttctcgtcagctggtgttagccgggcggagtgtgttagtctctccagagggaggctggttccccagggaagcagagcctgtgtgcgggcagcagctgtgtgcgggcctgggggttgttaagtgcaattatttttaataaaaggggcatttggaaaaaaaaaaaaaaggtagcagtcgacagatgaattctgcagatctgtggcttctagctgcccgggtggcatccctgtgacccctccccagtgcctctcctggccctggaagttgccactccagtgcccaccagccttgtcctaataaaattaagttgcatcattttgtctgactaggtgtccttctataatattatggggtggaggggggtggtatggagcaaggggcaagttgggaagacaacctgagttgttgggattccaggcatcgagtagataagtagcatggcgggttaatcattaactacaaggaacccctagtgatggagttggccactccctctctgcgcgctcgctcgctcactgaggccgggcgaccaaaggtcgcccgacgcccgggctttgcccgggcggcctcagtgagcgagcgagcgcgcagagagggacagatccgaagccgggcaaatcagcgcctggcagcagtggcgtctggcggaaaacctcagtgtgacgctccccgccgcgtcccacgcttgttcccggatctgaccaccagcgaaatccgatttttgcaccgagctgggtaataagcgttggcaatttaaccgccagtcaggctttctttcacagtgtggattggcgataaaaaacaactgctgacgccgctgcgcgatcagttcacccgttcaccgctggataacgacttggcgtaagtgaagcgacccgtaagaccctaacgcctgggtcgaacgctggaaggcggcgggccaaaccaggccgaagcagcgttgttgcagttcacggcagatacacttgctgttgcggtgctgattacgaccgctcactcgtggcagcaacaggggaaaaccttatttatcagccggaaaacctaccggattgttggtagtggtcaataggcgattaccgttgtgttgaagtggcgagcgatacaccgcttccggcgcggattggcctgaactgccaactggcgcaggtagcagagcgggtaaactggctcggattagggccgcaagaaaactatcccgaccgccttactgccgcctgttttgaccgctgggatctgccaagtcagacagtatagcccgtacgtcttcccgagcgaaaacggtctgcgctgcgggacgcgcgaattgaatttggcccacaccagtggcgcggcgacttccagttcaatatcagccgctacagtgaacagcaactgttggaaaccagccttcgccaactgctgcacgcggaagaaggcactggctgaatatcgacggtttccagttggggattggtggcgacgactcctggagcccgtcagtatcggcggacttccaactgagcgccggtcgctaccttaccagttggtctggtgtcaaaaagcgtccgcttgagtctagcgatcgcgcgcagatctgtcatgtgagcaaaaggccagcaaaaggccaggaaccgtaaaaaggccgcgttgctggcgtttttccataggctccgcccccctgacgagcatcacaaaaatcgacgctcaagtcagaggtggcgaaacccgacaggactataaagataccaggcgtttccccctggaagctccctcgtgcgctctcctgttccgaccctgccgcttaccggatacctgtccgcctttctcccttcgggaagcgtggcgctttctcatagctcacgctgtaggtatctcagttcggtgtaggtcgttcgctccaagctgggctgtgtgcacgaaccccccgttcagcccgaccgctgcgccttatccggtaactatcgtcttgagtccaacccggtaagacacgacttatcgccactggcagcagccactggtaacaggattagcagagcgaggtatgtaggcggtgctacagagttcttgaagtggtggcctaactacggctacactagaagaacagtatttggtatctgcgctctgctgaagccagttaccttcggaaaaagagttggtagctcttgatccggcaaacaaaccaccgctggtagcggtggtttttttgtttgcaagcagcagattacgcgcagaaaaaaaggatctcaagaagatcctttgatcttttctacggggtctgacgctcagtggaacgaaaactcacgttaagggattttggtcatgagattatcaaaaaggatcttcacctagatccttttcacgtagaaagccagtccgcagaaacggtgctgaccccggatgaatgtcagctactgggctatctggacaagggaaaacgcaagcgcaaagagaaagcaggtagcttgcagtgggcttacatggcgatagctagactgggcggttttatggacagcaagcgaaccggaattgccagctggggcgccctctggtaaggttgggaagccctgcaaagtaaactggatggctttcttgccgccaaggatctgatggcgcaggggatcaagatctgatcaagagacaggatgaggatcgtttcgcatgattgaacaagatggattgcacgcaggttctccggccgcttgggtggagaggctattcggctatgactgggcacaacagacaatcggctgctctgatgccgccgtgttccggctgtcagcgcaggggcgcccggttctttttgtcaagaccgacctgtccggtgccctgaatgaactgcaagacgaggcagcgcggctatcgtggctggccacgacgggcgttccttgcgcagctgtgctcgacgttgtcactgaagcgggaagggactggctgctattgggcgaagtgccggggcaggatctcctgtcatctcaccttgctcctgccgagaaagtatccatcatggctgatgcaatgcggcggctgcatacgcttgatccggctacctgcccattcgaccaccaagcgaaacatcgcatcgagcgagcacgtactcggatggaagccggtcttgtcgatcaggatgatctggacgaagagcatcaggggctcgcgccagccgaactgttcgccaggctcaaggcgagcatgcccgacggcgaggatctcgtcgtgacccatggcgatgcctgcttgccgaatatcatggtggaaaatggccgcttttctggattcatcgactgtggccggctgggtgtggcggaccgctatcaggacatagcgttggctacccgtgatattgctgaagagcttggcggcgaatgggctgaccgcttcctcgtgctttacggtatcgccgctcccgattcgcagcgcatcgccttctatcgccttcttgacgagttcttctgaatttaaagcccaatacgcaaaccgcctctccccgcgcgttggccgaagcggttcaatattttgttaaaattcgcgttaaatttttgttaaatcagctattttttaaccaataggccgaaatcggcaaaatcccttgtaaatcaaaagaatagaccgagatagggttgagtgttgttccagtttggaacaagagtccactattaaagaacgtggactccaacgtcaaagggcgaaaaaccgtctatcagggcgttggcccactacgtgaaccttcaccctaatcaagttttttggggtcgaggtgccgtaaagcactaaatcggaaccctaaagggagcccccgatttagagcttgacggggaaaccggcgaacgtggcgagaaaggaagggaagaaagcgaaaggagcgggcgctagggcgctggcaagtgtagcggtcacgctgcgcgtaaccaccacacccgccgcgctaagcgccgctacagggcgcgtcccttcgccttcaggctgcgtcgagtactgtactgtgagccagagttgcccggcgctctccggctgcggtagttcaggcagttcaatcaactgtttaccttgtggagcgactccagaggcacttcaccgcttgccagcggcttacgatccagcgccacgatccagtgcaggagatcgttatcgctatacggaacaggtattcgctggtcacttcgataaggtttgcccggataaacggaactggaaaaactgctgctggtgttttgcttccgtcagtgctggatcggcgtgcggtcggcaaagaccagaccgttctaacagaactggcgattgttcggcgtatcgccaaaatcaccgccgtaagccgaccacgggttgccgttttcagcaggatttaatcagcgactgatccacccagtcccagacgaagccgccctgtaaacggggatactgacgaaacgcctgccagtatttagcgaaaccgccaagactgttacccaagcgtgggcgtattcgcaaaggatcagcgggcgcgtctctccaggtagcgaaagccttttttgatcgacctttcggcacagccgggaagggctggtcttcaaccacgcgcgcgtacaacgggcaaataatatcggtggccgtggtgtcggctccgccgccttcaactgcaccgggcgggaaggatcgacagatttgatccagcgatacagcgcgtcgtgattagcgccgtggcctgattcaattccccagcgaccagtagatcacactcgggtgattacgattgcgctgcaccagtcgcgttacggttcgctcttcgccggtagccagcgcggatcacggtcagacgattcgttggcacgatccgtgggtttcaatactggcttcaaaccaccactaacaggccgtagcggtcgcacagcgtgtaccacagcggttggttcggataatcgaacagcgcacggcgttaaagttgttctgcttcaacagcaggatattctgcaccttcgtctgctcttcctaacctgaccaagcagaggatctgctcgtgacggttaatcctcgaatcagcaacggcttgccgttcagcagcagcagaccaagttcaatccgcacctcgcggaaaccgacaacgcaggcttctgcttcaatcagcgtgccgtcggcggtgtgcagttcaaccaccgcacgatagagattcgggatttcggcgctccacagtttcgggttttcgacgttcagacgtagtgtgacgcgatctgcaaaccaccacgctcaacgataatttcaccgccgaaaggcgcggtgccgctggcgacctgcgtttcaccctgccagaaagaaactgttacccgtaggtagtcacgcaactcgccgcacactgaacttcagcctccagtacagcgcggctgaaatcgtcttaaagcgagtggcaactggaaatcgctgatttgtgtagtcggtttagcagcaacgagacttcacggaaaatccgctaatccgccacagatcctgatcttccagataactgccgtcactccaacgcagcaccttcaccgcgaggcggttttctccggcgcgtaaaaatcgctcaggtcaaattcagacggcaaacgactgtcctggccgtaaccgacccagcgcccgttgcaccacagattgaaacgccgagtttacgcctcaaaaataattcgcgtctggccttcctgtagccagctttcacaactataatagtgagcgagtaacaacccgtcggattctccgtgggaacaaacggcggattgaccgtatagggataggttacgttggtgtagtagggcgctccgtaaccgtgctactgccagtttgaggggacgacgacagtatcggcctcaggaagatcgcactccagccagctttccggcaccgcttctggtactggaaaccaggcaaagcgcctatcgcctatcaggctgcacaactgttgggaagggcgatctgtgcgggcctcttcgctattacgccagcttgcgaaagggggtagtgctgcaaggcgattaagttgggtaacgccagggttttcccagtcacgacgtggatctgggccactccctct

SEQ ID NO: 467-469 - skipped (3 entries)

SEQ ID NO: 470 - DNA, 7993 bp, synthetic construct
  source 1..7993: mol_type = other DNA
tctagagctagcatatggatccatcgatttagggataacagggtaattatcagcacacaattgcccattatacgcgcgtataatggactattgtgtgctgatatctgtacacttaagggctagatcttagcttacgtcactagagggtccacgtttagtttttaagatccattgatctcctaaacgctgcaagattcgcaacctggtatacttagcctaggcgctaggtcctagtgcagcgggactttttttctaaagtcgttgagaggaggagtcgtcagaccagatagctttgatgtcctgatcggaaggatcgttggcccccctgcaggcagctgttaattaactgcgcgctcgctcgctcactgaggccgcccgggcaaagcccgggcgtcgggcgacctttggtcgcccggcctcagtgagcgagcgagcgcgcagagagggagtggccaactccatcactaggggttccttgtagttaatgattaacccgccatgctacttatctacggcgcgccacgcgttctaggagttaatttttaaaaagcagtcaaaagtccaagtgcccttgcgagcatttactctctctgtttgctctggttaataatctcaggagcacaaacattccttactagttctaggagttaatttttaaaaagcagtcaaaagtccaagtgcccttgcgagcatttactctctctgtttgctctggttaataatctcaggagcacaaacattccttactagttctagagcggccgccagtgtgctggaattcggcttttttagggctggaagctacctttgacatcatttcctctgcgaatgcatgtataatttctacagaacctattagaaaggatcacccagcctctgcttttgtacaactttcccttaaaaaactgccaatcccactgctgtttggcccaatagtgagaactttttcctgctgcctcttggtgcttttgcctatggcccctattctgcctgctgaagacactcttgccagcatggacttaaacccctccagctctgacaatcctctttctcttttgttttacatgaagggtctggcagccaaagcaatcactcaaagttcaaaccttatcattttttgctttgttcctcttggccttggttttgtacatcagctttgaaaataccatcccagggttaatgctggggttaatttataactgagagtgctctagttctgcaatacaggacatgctataaaaatggaaagatgttgctttctgagagatcaggtggattcttgggcatttgcttaagcttggtaccgccaccatgggggtgaggcaccctccctgttctcacaggctgctggctgtgtgtgctctggtgtctctggccactgctgccctgctgggccagcagggggccagcaggccaggccccagggatgcccaggcccaccctggcagacccagggctgtgcccacccagtgtgatgtgcctcccaacagcagatttgactgtgcccctgataaggccattactcaggaacagtgtgaggccaggggctgctgctatatccctgccaagcagggcctgcagggggcccagatggggcagccctggtgcttcttcccccccagctacccctcttataagctggagaatctgagcagctctgaaatgggctacactgccactctgaccaggactacccccaccttcttccccaaggatattctgactctgaggctggatgtgatgatggagactgagaacaggctgcacttcaccatcaaggaccctgccaacaggaggtatgaggtgcccctggaaactcccagggtgcactctagggcccccagccccctgtattctgtggagttctctgaggagccttttggggtcattgtccacaggcagctggatggcagggtgctgctgaatactactgtggcccctctgttctttgctgaccagttcctgcagctgagcaccagcctgccttctcagtacattactggcctggctgagcatctgagccccctgatgctgagcacctcttggaccagaatcaccctgtggaacagggacctggctcccactcctggggccaacctgtatggcagccaccccttctacctggccctggaggatgggggctctgcccatggggtgttcctgctgaacagcaatgccatggatgtggtgctgcagccctctcctgccctgtcttggagatctactgggggcatcctggatgtgtatatcttcctggggcctgagcccaagtctgtggtgcagcagtacctggatgtggtgggctaccccttcatgcccccctactggggcctgggcttccacctgtgcaggtggggctactcttctactgctatcaccaggcaggtggtggagaacatgaccagggctcacttccctctggatgtgcagtggaatgacctggactacatggactctaggagagacttcacttttaataaggatgggttcagggactttcctgccatggtgcaggagctgcatcaggggggcaggagatatatgatgattgtggaccctgctatttctagctctggccctgctggcagctataggccctatgatgaggggctgaggaggggggtgttcatcactaatgagactggccagcccctgattggcaaggtgtggcctggctctactgccttccctgatttcaccaaccccactgccctggcctggtgggaggatatggtggctgagtttcatgaccaggtgccctttgatggcatgtggattgacatgaatgagcccagcaactttatcaggggctctgaagatggctgccccaacaatgagctggagaaccccccctatgtgcctggggtggtggggggcaccctgcaggctgccaccatctgtgccagcagccaccagttcctgagcacccactataacctgcacaacctgtatggcctgactgaggccattgcctctcacagggccctggtgaaggctagggggactaggccctttgtgatcagcaggtctacttttgctggccatggcaggtatgctgggcactggactggggatgtgtggtctagctgggagcagctggccagctctgtgcctgagatcctgcagtttaatctgctgggggtgcccctggtgggggctgatgtgtgtggcttcctgggcaatacctctgaggagctgtgtgtgaggtggactcagctgggggctttctaccccttcatgagaaaccacaactctctgctgagcctgccccaggagccctattctttttctgagcctgcccagcaggctatgaggaaggccctgactctgaggtatgccctgctgccccacctgtataccctgttccatcaggcccatgtggctggggagactgtggccagacctctgttcctggagttccccaaggatagctctacttggactgtggaccaccagctgctgtggggggaggctctgctgatcacccctgtgctgcaggctgggaaggctgaggtgactggctatttccccctgggcacctggtatgatctgcagactgtgcccattgaggccctgggctctctgccccctccccctgctgcccccagggagcctgccatccactctgagggccagtgggtgaccctgcctgcccctctggacactatcaatgtgcacctgagggctggctacatcatccccctgcagggccctggcctgactaccactgagtctaggcagcagcccatggccctggctgtggctctgaccaaggggggggaggccaggggggagctgttctgggatgatggggagtctctggaggtgctggagaggggggcctacacccaggtgatcttcctggctaggaataacaccattgtcaatgagctggtgagggtgacctctgagggggctggcctgcagctgcagaaggtgactgtgctgggggtggctactgccccccagcaggtgctgagcaatggggtgcctgtgagcaacttcacctatagccctgacaccaaggtgctggacatctgtgtgagcctgctgatgggggagcagttcctggtgagctggtgctaatttaaatctcgagccgggcggagtgtgttagtctctccagagggaggctggttccccagggaagcagagcctgtgtgcgggcagcagctgtgtgcgggcctgggggttgttaagtgcaattatttttaataaaaggggcatttggaaaaaaaaaaaaaaggtagcagtcgacagatgaattctgcagatctgtggcttctagctgcccgggtggcatccctgtgacccctccccagtgcctctcctggccctggaagttgccactccagtgcccaccagccttgtcctaataaaattaagttgcatcattttgtctgactaggtgtccttctataatattatggggtggaggggggtggtatggagcaaggggcaagttgggaagacaacctgtagggcctgcggggtctattgggaaccaagctggagtgcagtggcacaatcttggctcactgcaatctccgcctcctgggttcaagcgattctcctgcctcagcctcccgagttgttgggattccaggcatgcatgaccaggctcagctaatttttgtttttttggtagagacggggtttcaccatattggccaggctggtctccaactcctaatctcaggtgatctacccaccttggcctcccaaattgctgggattacaggcgtgaaccactgctcccttccctgtccttctgattttaaaaaaaagagaaatgttctggcacctgcacttgcactggggacagcctattttgctagtttgttttgtttcgttttgttttgatggagagcgtatgttgtttaaacgcggccgcgtagataagtagcatggcgggttaatcattaactacaaggaacccctagtgatggagttggccactccctctctgcgcgctcgctcgctcactgaggccgggcgaccaaaggtcgcccgacgcccgggctttgcccgggcggcctcagtgagcgagcgagcgcgcagttaattaaggcgccctaggccgacccttagactctgtactcagttctataaacgagccattggatacgagatccgtagattgataagggacacggaatatccccggacgcaatagacaccggtggacagcttggtatcctgagcacagtcgcgcgtccgaatctagctctactttagaggccccggattctgatggtcgtagaccgcagaaccgattggggggatgagatctactagttatcagcacacaattgcccattatacgcgcgtataatggactattgtgtgctgatatagggataacagggtaattctagagctagcatatggatccatcgatttgatgcggtattttctccttacgcatctgtgcggtatttcacaccgcatacgtcaaagcaaccatagtacgcgccctgtagcggcgcattaagcgcggcgggtgtggtggttacgcgcagcgtgaccgctacacttgccagcgccctagcgcccgctcctttcgctttcttcccttcctttctcgccacgttcgccggctttccccgtcaagctctaaatcgggggctccctttagggttccgatttagtgctttacggcacctcgaccccaaaaaacttgatttgggtgatggttcacgtagtgggccatcgccctgatagacggtttttcgccctttgacgttggagtccacgttctttaatagtggactcttgttccaaactggaacaacactcaactctatctcgggctattcttttgatttataagggattttgccgatttcggtctattggttaaaaaatgagctgatttaacaaaaatttaacgcgaattttaacaaaatattaacgtttacaattttatggtgcactctcagtacaatctgctctgatgccgcatagttaagccagccccgacacccgccaacacccgctgacgcgccctgacgggcttgtctgctcccggcatccgcttacagacaagctgtgaccgtctccgggagctgcatgtgtcagaggttttcaccgtcatcaccgaaacgcgcgagacgaaagggcctcgtgatacgcctatttttataggttaatgtcatgataataatggtttcttagacgtcaggtggcacttttcggggaaatgtgcgcggaacccctatttgtttatttttctaaatacattcaaatatgtatccgctcatgagacaataaccctgataaatgcttcaataatattgaaaaaggaagagtatgagccatattcaacgggaaacgtcgaggccgcgattaaattccaacatggatgctgatttatatgggtataaatgggctcgcgataatgtcgggcaatcaggtgcgacaatctatcgcttgtatgggaagcccgatgcgccagagttgtttctgaaacatggcaaaggtagcgttgccaatgatgttacagatgagatggtcagactaaactggctgacggaatttatgcctcttccgaccatcaagcattttatccgtactcctgatgatgcatggttactcaccactgcgatccccggaaaaacagcattccaggtattagaagaatatcctgattcaggtgaaaatattgttgatgcgctggcagtgttcctgcgccggttgcattcgattcctgtttgtaattgtccttttaacagcgatcgcgtatttcgtctcgctcaggcgcaatcacgaatgaataacggtttggttgatgcgagtgattttgatgacgagcgtaatggctggcctgttgaacaagtctggaaagaaatgcataaacttttgccattctcaccggattcagtcgtcactcatggtgatttctcacttgataaccttatttttgacgaggggaaattaataggttgtattgatgttggacgagtcggaatcgcagaccgataccaggatcttgccatcctatggaactgcctcggtgagttttctccttcattacagaaacggctttttcaaaaatatggtattgataatcctgatatgaataaattgcagtttcatttgatgctcgatgagtttttctaagcgtataatggtctagagctagcatatggatccatcgattccattatacgcctgtcagaccaagtttactcatatatactttagattgatttaaaacttcatttttaatttaaaaggatctaggtgaagatcctttttgataatctcatgaccaaaatcccttaacgtgagttttcgttccactgagcgtcagaccccgtagaaaagatcaaaggatcttcttgagatcctttttttctgcgcgtaatctgctgcttgcaaacaaaaaaaccaccgctaccagcggtggtttgtttgccggatcaagagctaccaactctttttccgaaggtaactggcttcagcagagcgcagataccaaatactgttcttctagtgtagccgtagttaggccaccacttcaagaactctgtagcaccgcctacatacctcgctctgctaatcctgttaccagtggctgctgccagtggcgataagtcgtgtcttaccgggttggactcaagacgatagttaccggataaggcgcagcggtcgggctgaacggggggttcgtgcacacagcccagcttggagcgaacgacctacaccgaactgagatacctacagcgtgagctatgagaaagcgccacgcttcccgaagggagaaaggcggacaggtatccggtaagcggcagggtcggaacaggagagcgcacgagggagcttccagggggaaacgcctggtatctttatagtcctgtcgggtttcgccacctctgacttgagcgtcgatttttgtgatgctcgtcaggggggcggagcctatggaaaaacgccagcaacgcggcctttttacggttcctggccttttgctggccttttgctcacatgt

SEQ ID NO: 471 - DNA, 7996 bp, synthetic construct
  source 1..7996: mol_type = other DNA
tctagagctagcatatggatccatcgatttagggataacagggtaattatcagcacacaattgcccattatacgcgcgtataatggactattgtgtgctgatatctgtacacttaagggctagatcttagcttacgtcactagagggtccacgtttagtttttaagatccattgatctcctaaacgctgcaagattcgcaacctggtatacttagcctaggcgctaggtcctagtgcagcgggactttttttctaaagtcgttgagaggaggagtcgtcagaccagatagctttgatgtcctgatcggaaggatcgttggcccccctgcaggcagctgttaattaactgcgcgctcgctcgctcactgaggccgcccgggcaaagcccgggcgtcgggcgacctttggtcgcccggcctcagtgagcgagcgagcgcgcagagagggagtggccaactccatcactaggggttccttgtagttaatgattaacccgccatgctacttatctacggcgcgccacgcgttctaggagttaatttttaaaaagcagtcaaaagtccaagtgcccttgcgagcatttactctctctgtttgctctggttaataatctcaggagcacaaacattccttactagttctaggagttaatttttaaaaagcagtcaaaagtccaagtgcccttgcgagcatttactctctctgtttgctctggttaataatctcaggagcacaaacattccttactagttctagagcggccgccagtgtgctggaattcggcttttttagggctggaagctacctttgacatcatttcctctgcgaatgcatgtataatttctacagaacctattagaaaggatcacccagcctctgcttttgtacaactttcccttaaaaaactgccaatcccactgctgtttggcccaatagtgagaactttttcctgctgcctcttggtgcttttgcctatggcccctattctgcctgctgaagacactcttgccagcatggacttaaacccctccagctctgacaatcctctttctcttttgttttacatgaagggtctggcagccaaagcaatcactcaaagttcaaaccttatcattttttgctttgttcctcttggccttggttttgtacatcagctttgaaaataccatcccagggttaatgctggggttaatttataactgagagtgctctagttctgcaatacaggacatgctataaaaatggaaagatgttgctttctgagagatcaggtggattcttgggcatttgcttaagcttggtaccgccaccatgggagtgagacatcctccttgttctcatagactgctggctgtgtgtgctctggtgtctctggctacagctgctctgctgggacagcagggagcttctagacctggacctagagatgctcaggctcatcctggaagacctagagctgtgcctacacagtgtgatgtgcctcctaattctagatttgattgtgctcctgataaggctataacacaggagcagtgtgaggctagaggatgttgttatattcctgctaagcagggactgcagggagctcagatgggacagccttggtgtttttttcctccttcttatccttcttataagctggagaatctgtcttcttctgagatgggatatacagctacactgacaagaacaacacctacattttttcctaaggatattctgacactgagactggatgtgatgatggagacagagaatagactgcattttacaattaaggatcctgctaatagaagatatgaggtgcctctagagacacctagagtgcattctagagctccttctcctctgtattctgtggagttttctgaggagccttttggagtgattgtgcatagacagctggatggaagagtgctgctgaatacaacagtggctcctctgttttttgctgatcagtttctgcagctgtctacatctctgccttctcagtatattacaggactggctgagcatctgtctcctctgatgctgtctacatcttggacaagaattacactgtggaatagagatctggctcctacacctggagctaatctgtatggatctcatcctttttatctggctctggaggatggaggatctgctcatggagtgtttctgctgaattctaatgctatggatgtagtgctgcagccttctcctgctctgtcttggagatctacaggaggaattctggatgtgtatatttttctaggacctgagcctaagtctgtggtgcagcagtatctggatgtagtgggatatccttttatgcctccttattggggactgggatttcatctgtgtagatggggatattcttctacagctattacaagacaggtggttgagaatatgacaagagctcattttcctctggatgtgcagtggaatgatctagattatatggattctagaagagattttacatttaataaggatggatttagagattttcctgctatggtgcaggagctgcatcagggaggaagaagatatatgatgattgtggatcctgctatttcttcttctggacctgctggatcttatagaccttatgatgagggactgagaagaggagtgtttattacaaatgagacaggacagcctctgattggaaaggtgtggcctggatctacagcttttcctgattttacaaatcctacagctctggcttggtgggaggatatggtggctgagtttcatgatcaggtgccttttgatggaatgtggattgatatgaatgagccttctaattttataagaggatctgaggatggatgtcctaataatgagctagagaatcctccttatgtgcctggagtagtgggaggaacactgcaggctgctacaatttgtgcttcttctcatcagtttctgtctacacattataatctgcataatctgtatggactgacagaggctattgcttctcatagagctctggtgaaggctagaggaacaagaccttttgtgatttctagatctacatttgctggacatggaagatatgctggacattggacaggagatgtatggtcttcttgggagcagctagcttcttctgtgcctgagattctgcagtttaatctgctaggagtgcctctggtgggagctgatgtgtgtggatttctgggaaatacatctgaggagctgtgtgtgagatggacacagctgggagctttttatccttttatgagaaatcataattctctgctgtctctgcctcaggagccttattctttttctgagcctgctcagcaggctatgagaaaggctctgacactgagatatgctctgctgcctcatctgtatacactgtttcatcaggctcatgtggctggagagacagtagctagacctctgtttctggagtttcctaaggattcttctacatggacagttgatcatcagctgctgtggggagaggctctgctgattacacctgtgctgcaggctggaaaggctgaggtgacaggatattttcctctgggaacatggtatgatctgcagacagtgcctatagaggctctgggatctctgcctcctcctcctgctgctcctagagagcctgctattcattctgagggacagtgggtgacactgcctgctcctctggatacaattaatgtgcatctgagagctggatatattattcctctgcagggacctggactgacaacaacagagtctagacagcagcctatggctctggctgtggctctgacaaagggaggagaggctagaggagagctgttttgggatgatggagagtctctggaggtgctggagagaggagcttatacacaggtgatttttctggctagaaataatacaattgtgaatgagctggtgagagtgacatctgagggagctggactgcagctgcagaaggtgacagtgctgggagtggctacagctcctcagcaggtgctgtctaatggagtgcctgtgtctaattttacatattctcctgatacaaaggtgctggatatttgtgtgtctctgctgatgggagagcagtttctggtgtcttggtgttaatgatttaaatctcgagccgggcggagtgtgttagtctctccagagggaggctggttccccagggaagcagagcctgtgtgcgggcagcagctgtgtgcgggcctgggggttgttaagtgcaattatttttaataaaaggggcatttggaaaaaaaaaaaaaaggtagcagtcgacagatgaattctgcagatctgtggcttctagctgcccgggtggcatccctgtgacccctccccagtgcctctcctggccctggaagttgccactccagtgcccaccagccttgtcctaataaaattaagttgcatcattttgtctgactaggtgtccttctataatattatggggtggaggggggtggtatggagcaaggggcaagttgggaagacaacctgtagggcctgcggggtctattgggaaccaagctggagtgcagtggcacaatcttggctcactgcaatctccgcctcctgggttcaagcgattctcctgcctcagcctcccgagttgttgggattccaggcatgcatgaccaggctcagctaatttttgtttttttggtagagacggggtttcaccatattggccaggctggtctccaactcctaatctcaggtgatctacccaccttggcctcccaaattgctgggattacaggcgtgaaccactgctcccttccctgtccttctgattttaaaaaaaagagaaatgttctggcacctgcacttgcactggggacagcctattttgctagtttgttttgtttcgttttgttttgatggagagcgtatgttgtttaaacgcggccgcgtagataagtagcatggcgggttaatcattaactacaaggaacccctagtgatggagttggccactccctctctgcgcgctcgctcgctcactgaggccgggcgaccaaaggtcgcccgacgcccgggctttgcccgggcggcctcagtgagcgagcgagcgcgcagttaattaaggcgccctaggccgacccttagactctgtactcagttctataaacgagccattggatacgagatccgtagattgataagggacacggaatatccccggacgcaatagacaccggtggacagcttggtatcctgagcacagtcgcgcgtccgaatctagctctactttagaggccccggattctgatggtcgtagaccgcagaaccgattggggggatgagatctactagttatcagcacacaattgcccattatacgcgcgtataatggactattgtgtgctgatatagggataacagggtaattctagagctagcatatggatccatcgatttgatgcggtattttctccttacgcatctgtgcggtatttcacaccgcatacgtcaaagcaaccatagtacgcgccctgtagcggcgcattaagcgcggcgggtgtggtggttacgcgcagcgtgaccgctacacttgccagcgccctagcgcccgctcctttcgctttcttcccttcctttctcgccacgttcgccggctttccccgtcaagctctaaatcgggggctccctttagggttccgatttagtgctttacggcacctcgaccccaaaaaacttgatttgggtgatggttcacgtagtgggccatcgccctgatagacggtttttcgccctttgacgttggagtccacgttctttaatagtggactcttgttccaaactggaacaacactcaactctatctcgggctattcttttgatttataagggattttgccgatttcggtctattggttaaaaaatgagctgatttaacaaaaatttaacgcgaattttaacaaaatattaacgtttacaattttatggtgcactctcagtacaatctgctctgatgccgcatagttaagccagccccgacacccgccaacacccgctgacgcgccctgacgggcttgtctgctcccggcatccgcttacagacaagctgtgaccgtctccgggagctgcatgtgtcagaggttttcaccgtcatcaccgaaacgcgcgagacgaaagggcctcgtgatacgcctatttttataggttaatgtcatgataataatggtttcttagacgtcaggtggcacttttcggggaaatgtgcgcggaacccctatttgtttatttttctaaatacattcaaatatgtatccgctcatgagacaataaccctgataaatgcttcaataatattgaaaaaggaagagtatgagccatattcaacgggaaacgtcgaggccgcgattaaattccaacatggatgctgatttatatgggtataaatgggctcgcgataatgtcgggcaatcaggtgcgacaatctatcgcttgtatgggaagcccgatgcgccagagttgtttctgaaacatggcaaaggtagcgttgccaatgatgttacagatgagatggtcagactaaactggctgacggaatttatgcctcttccgaccatcaagcattttatccgtactcctgatgatgcatggttactcaccactgcgatccccggaaaaacagcattccaggtattagaagaatatcctgattcaggtgaaaatattgttgatgcgctggcagtgttcctgcgccggttgcattcgattcctgtttgtaattgtccttttaacagcgatcgcgtatttcgtctcgctcaggcgcaatcacgaatgaataacggtttggttgatgcgagtgattttgatgacgagcgtaatggctggcctgttgaacaagtctggaaagaaatgcataaacttttgccattctcaccggattcagtcgtcactcatggtgatttctcacttgataaccttatttttgacgaggggaaattaataggttgtattgatgttggacgagtcggaatcgcagaccgataccaggatcttgccatcctatggaactgcctcggtgagttttctccttcattacagaaacggctttttcaaaaatatggtattgataatcctgatatgaataaattgcagtttcatttgatgctcgatgagtttttctaagcgtataatggtctagagctagcatatggatccatcgattccattatacgcctgtcagaccaagtttactcatatatactttagattgatttaaaacttcatttttaatttaaaaggatctaggtgaagatcctttttgataatctcatgaccaaaatcccttaacgtgagttttcgttccactgagcgtcagaccccgtagaaaagatcaaaggatcttcttgagatcctttttttctgcgcgtaatctgctgcttgcaaacaaaaaaaccaccgctaccagcggtggtttgtttgccggatcaagagctaccaactctttttccgaaggtaactggcttcagcagagcgcagataccaaatactgttcttctagtgtagccgtagttaggccaccacttcaagaactctgtagcaccgcctacatacctcgctctgctaatcctgttaccagtggctgctgccagtggcgataagtcgtgtcttaccgggttggactcaagacgatagttaccggataaggcgcagcggtcgggctgaacggggggttcgtgcacacagcccagcttggagcgaacgacctacaccgaactgagatacctacagcgtgagctatgagaaagcgccacgcttcccgaagggagaaaggcggacaggtatccggtaagcggcagggtcggaacaggagagcgcacgagggagcttccagggggaaacgcctggtatctttatagtcctgtcgggtttcgccacctctgacttgagcgtcgatttttgtgatgctcgtcaggggggcggagcctatggaaaaacgccagcaacgcggcctttttacggttcctggccttttgctggccttttgctcacatgt

SEQ ID NO: 472 - DNA, 7984 bp, synthetic construct
  source 1..7984: mol_type = other DNA
tctagagctagcatatggatccatcgatttagggataacagggtaattatcagcacacaattgcccattatacgcgcgtataatggactattgtgtgctgatatctgtacacttaagggctagatcttagcttacgtcactagagggtccacgtttagtttttaagatccattgatctcctaaacgctgcaagattcgcaacctggtatacttagcctaggcgctaggtcctagtgcagcgggactttttttctaaagtcgttgagaggaggagtcgtcagaccagatagctttgatgtcctgatcggaaggatcgttggcccccctgcaggcagctgttaattaactgcgcgctcgctcgctcactgaggccgcccgggcaaagcccgggcgtcgggcgacctttggtcgcccggcctcagtgagcgagcgagcgcgcagagagggagtggccaactccatcactaggggttccttgtagttaatgattaacccgccatgctacttatctacggcgcgccacgcgttctaggagttaatttttaaaaagcagtcaaaagtccaagtgcccttgcgagcatttactctctctgtttgctctggttaataatctcaggagcacaaacattccttactagttctaggagttaatttttaaaaagcagtcaaaagtccaagtgcccttgcgagcatttactctctctgtttgctctggttaataatctcaggagcacaaacattccttactagttctagagcggccgccagtgtgctggaattcggcttttttagggctggaagctacctttgacatcatttcctctgcgaatgcatgtataatttctacagaacctattagaaaggatcacccagcctctgcttttgtacaactttcccttaaaaaactgccaatcccactgctgtttggcccaatagtgagaactttttcctgctgcctcttggtgcttttgcctatggcccctattctgcctgctgaagacactcttgccagcatggacttaaacccctccagctctgacaatcctctttctcttttgttttacatgaagggtctggcagccaaagcaatcactcaaagttcaaaccttatcattttttgctttgttcctcttggccttggttttgtacatcagctttgaaaataccatcccagggttaatgctggggttaatttataactgagagtgctctagttctgcaatacaggacatgctataaaaatggaaagatgttgctttctgagagatcaggtggattcttgggcatttgcttaagcttggtaccttttttatgggccatatcctcatgtacagaatgcagctgctgtcctgcattgcactgtcactggcactggttaccaactcacagcagggggccagcaggccaggccccagggatgcccaggcccaccctggcagacccagggctgtgcccacccagtgtgatgtgcctcccaacagcagatttgactgtgcccctgataaggccattactcaggaacagtgtgaggccaggggctgctgctatatccctgccaagcagggcctgcagggggcccagatggggcagccctggtgcttcttcccccccagctacccctcttataagctggagaatctgagcagctctgaaatgggctacactgccactctgaccaggactacccccaccttcttccccaaggatattctgactctgaggctggatgtgatgatggagactgagaacaggctgcacttcaccatcaaggaccctgccaacaggaggtatgaggtgcccctggaaactcccagggtgcactctagggcccccagccccctgtattctgtggagttctctgaggagccttttggggtcattgtccacaggcagctggatggcagggtgctgctgaatactactgtggcccctctgttctttgctgaccagttcctgcagctgagcaccagcctgccttctcagtacattactggcctggctgagcatctgagccccctgatgctgagcacctcttggaccagaatcaccctgtggaacagggacctggctcccactcctggggccaacctgtatggcagccaccccttctacctggccctggaggatgggggctctgcccatggggtgttcctgctgaacagcaatgccatggatgtggtgctgcagccctctcctgccctgtcttggagatctactgggggcatcctggatgtgtatatcttcctggggcctgagcccaagtctgtggtgcagcagtacctggatgtggtgggctaccccttcatgcccccctactggggcctgggcttccacctgtgcaggtggggctactcttctactgctatcaccaggcaggtggtggagaacatgaccagggctcacttccctctggatgtgcagtggaatgacctggactacatggactctaggagagacttcacttttaataaggatgggttcagggactttcctgccatggtgcaggagctgcatcaggggggcaggagatatatgatgattgtggaccctgctatttctagctctggccctgctggcagctataggccctatgatgaggggctgaggaggggggtgttcatcactaatgagactggccagcccctgattggcaaggtgtggcctggctctactgccttccctgatttcaccaaccccactgccctggcctggtgggaggatatggtggctgagtttcatgaccaggtgccctttgatggcatgtggattgacatgaatgagcccagcaactttatcaggggctctgaagatggctgccccaacaatgagctggagaaccccccctatgtgcctggggtggtggggggcaccctgcaggctgccaccatctgtgccagcagccaccagttcctgagcacccactataacctgcacaacctgtatggcctgactgaggccattgcctctcacagggccctggtgaaggctagggggactaggccctttgtgatcagcaggtctacttttgctggccatggcaggtatgctgggcactggactggggatgtgtggtctagctgggagcagctggccagctctgtgcctgagatcctgcagtttaatctgctgggggtgcccctggtgggggctgatgtgtgtggcttcctgggcaatacctctgaggagctgtgtgtgaggtggactcagctgggggctttctaccccttcatgagaaaccacaactctctgctgagcctgccccaggagccctattctttttctgagcctgcccagcaggctatgaggaaggccctgactctgaggtatgccctgctgccccacctgtataccctgttccatcaggcccatgtggctggggagactgtggccagacctctgttcctggagttccccaaggatagctctacttggactgtggaccaccagctgctgtggggggaggctctgctgatcacccctgtgctgcaggctgggaaggctgaggtgactggctatttccccctgggcacctggtatgatctgcagactgtgcccattgaggccctgggctctctgccccctccccctgctgcccccagggagcctgccatccactctgagggccagtgggtgaccctgcctgcccctctggacactatcaatgtgcacctgagggctggctacatcatccccctgcagggccctggcctgactaccactgagtctaggcagcagcccatggccctggctgtggctctgaccaaggggggggaggccaggggggagctgttctgggatgatggggagtctctggaggtgctggagaggggggcctacacccaggtgatcttcctggctaggaataacaccattgtcaatgagctggtgagggtgacctctgagggggctggcctgcagctgcagaaggtgactgtgctgggggtggctactgccccccagcaggtgctgagcaatggggtgcctgtgagcaacttcacctatagccctgacaccaaggtgctggacatctgtgtgagcctgctgatgggggagcagttcctggtgagctggtgctaatttaaatctcgagccgggcggagtgtgttagtctctccagagggaggctggttccccagggaagcagagcctgtgtgcgggcagcagctgtgtgcgggcctgggggttgttaagtgcaattatttttaataaaaggggcatttggaaaaaaaaaaaaaaggtagcagtcgacagatgaattctgcagatctgtggcttctagctgcccgggtggcatccctgtgacccctccccagtgcctctcctggccctggaagttgccactccagtgcccaccagccttgtcctaataaaattaagttgcatcattttgtctgactaggtgtccttctataatattatggggtggaggggggtggtatggagcaaggggcaagttgggaagacaacctgtagggcctgcggggtctattgggaaccaagctggagtgcagtggcacaatcttggctcactgcaatctccgcctcctgggttcaagcgattctcctgcctcagcctcccgagttgttgggattccaggcatgcatgaccaggctcagctaatttttgtttttttggtagagacggggtttcaccatattggccaggctggtctccaactcctaatctcaggtgatctacccaccttggcctcccaaattgctgggattacaggcgtgaaccactgctcccttccctgtccttctgattttaaaaaaaagagaaatgttctggcacctgcacttgcactggggacagcctattttgctagtttgttttgtttcgttttgttttgatggagagcgtatgttgtttaaacgcggccgcgtagataagtagcatggcgggttaatcattaactacaaggaacccctagtgatggagttggccactccctctctgcgcgctcgctcgctcactgaggccgggcgaccaaaggtcgcccgacgcccgggctttgcccgggcggcctcagtgagcgagcgagcgcgcagttaattaaggcgccctaggccgacccttagactctgtactcagttctataaacgagccattggatacgagatccgtagattgataagggacacggaatatccccggacgcaatagacaccggtggacagcttggtatcctgagcacagtcgcgcgtccgaatctagctctactttagaggccccggattctgatggtcgtagaccgcagaaccgattggggggatgagatctactagttatcagcacacaattgcccattatacgcgcgtataatggactattgtgtgctgatatagggataacagggtaattctagagctagcatatggatccatcgatttgatgcggtattttctccttacgcatctgtgcggtatttcacaccgcatacgtcaaagcaaccatagtacgcgccctgtagcggcgcattaagcgcggcgggtgtggtggttacgcgcagcgtgaccgctacacttgccagcgccctagcgcccgctcctttcgctttcttcccttcctttctcgccacgttcgccggctttccccgtcaagctctaaatcgggggctccctttagggttccgatttagtgctttacggcacctcgaccccaaaaaacttgatttgggtgatggttcacgtagtgggccatcgccctgatagacggtttttcgccctttgacgttggagtccacgttctttaatagtggactcttgttccaaactggaacaacactcaactctatctcgggctattcttttgatttataagggattttgccgatttcggtctattggttaaaaaatgagctgatttaacaaaaatttaacgcgaattttaacaaaatattaacgtttacaattttatggtgcactctcagtacaatctgctctgatgccgcatagttaagccagccccgacacccgccaacacccgctgacgcgccctgacgggcttgtctgctcccggcatccgcttacagacaagctgtgaccgtctccgggagctgcatgtgtcagaggttttcaccgtcatcaccgaaacgcgcgagacgaaagggcctcgtgatacgcctatttttataggttaatgtcatgataataatggtttcttagacgtcaggtggcacttttcggggaaatgtgcgcggaacccctatttgtttatttttctaaatacattcaaatatgtatccgctcatgagacaataaccctgataaatgcttcaataatattgaaaaaggaagagtatgagccatattcaacgggaaacgtcgaggccgcgattaaattccaacatggatgctgatttatatgggtataaatgggctcgcgataatgtcgggcaatcaggtgcgacaatctatcgcttgtatgggaagcccgatgcgccagagttgtttctgaaacatggcaaaggtagcgttgccaatgatgttacagatgagatggtcagactaaactggctgacggaatttatgcctcttccgaccatcaagcattttatccgtactcctgatgatgcatggttactcaccactgcgatccccggaaaaacagcattccaggtattagaagaatatcctgattcaggtgaaaatattgttgatgcgctggcagtgttcctgcgccggttgcattcgattcctgtttgtaattgtccttttaacagcgatcgcgtatttcgtctcgctcaggcgcaatcacgaatgaataacggtttggttgatgcgagtgattttgatgacgagcgtaatggctggcctgttgaacaagtctggaaagaaatgcataaacttttgccattctcaccggattcagtcgtcactcatggtgatttctcacttgataaccttatttttgacgaggggaaattaataggttgtattgatgttggacgagtcggaatcgcagaccgataccaggatcttgccatcctatggaactgcctcggtgagttttctccttcattacagaaacggctttttcaaaaatatggtattgataatcctgatatgaataaattgcagtttcatttgatgctcgatgagtttttctaagcgtataatggtctagagctagcatatggatccatcgattccattatacgcctgtcagaccaagtttactcatatatactttagattgatttaaaacttcatttttaatttaaaaggatctaggtgaagatcctttttgataatctcatgaccaaaatcccttaacgtgagttttcgttccactgagcgtcagaccccgtagaaaagatcaaaggatcttcttgagatcctttttttctgcgcgtaatctgctgcttgcaaacaaaaaaaccaccgctaccagcggtggtttgtttgccggatcaagagctaccaactctttttccgaaggtaactggcttcagcagagcgcagataccaaatactgttcttctagtgtagccgtagttaggccaccacttcaagaactctgtagcaccgcctacatacctcgctctgctaatcctgttaccagtggctgctgccagtggcgataagtcgtgtcttaccgggttggactcaagacgatagttaccggataaggcgcagcggtcgggctgaacggggggttcgtgcacacagcccagcttggagcgaacgacctacaccgaactgagatacctacagcgtgagctatgagaaagcgccacgcttcccgaagggagaaaggcggacaggtatccggtaagcggcagggtcggaacaggagagcgcacgagggagcttccagggggaaacgcctggtatctttatagtcctgtcgggtttcgccacctctgacttgagcgtcgatttttgtgatgctcgtcaggggggcggagcctatggaaaaacgccagcaacgcggcctttttacggttcctggccttttgctggccttttgctcacatgt

SEQ ID NO: 473 - DNA, 7984 bp, synthetic construct
  source 1..7984: mol_type = other DNA
tctagagctagcatatggatccatcgatttagggataacagggtaattatcagcacacaattgcccattatacgcgcgtataatggactattgtgtgctgatatctgtacacttaagggctagatcttagcttacgtcactagagggtccacgtttagtttttaagatccattgatctcctaaacgctgcaagattcgcaacctggtatacttagcctaggcgctaggtcctagtgcagcgggactttttttctaaagtcgttgagaggaggagtcgtcagaccagatagctttgatgtcctgatcggaaggatcgttggcccccctgcaggcagctgttaattaactgcgcgctcgctcgctcactgaggccgcccgggcaaagcccgggcgtcgggcgacctttggtcgcccggcctcagtgagcgagcgagcgcgcagagagggagtggccaactccatcactaggggttccttgtagttaatgattaacccgccatgctacttatctacggcgcgccacgcgttctaggagttaatttttaaaaagcagtcaaaagtccaagtgcccttgcgagcatttactctctctgtttgctctggttaataatctcaggagcacaaacattccttactagttctaggagttaatttttaaaaagcagtcaaaagtccaagtgcccttgcgagcatttactctctctgtttgctctggttaataatctcaggagcacaaacattccttactagttctagagcggccgccagtgtgctggaattcggcttttttagggctggaagctacctttgacatcatttcctctgcgaatgcatgtataatttctacagaacctattagaaaggatcacccagcctctgcttttgtacaactttcccttaaaaaactgccaatcccactgctgtttggcccaatagtgagaactttttcctgctgcctcttggtgcttttgcctatggcccctattctgcctgctgaagacactcttgccagcatggacttaaacccctccagctctgacaatcctctttctcttttgttttacatgaagggtctggcagccaaagcaatcactcaaagttcaaaccttatcattttttgctttgttcctcttggccttggttttgtacatcagctttgaaaataccatcccagggttaatgctggggttaatttataactgagagtgctctagttctgcaatacaggacatgctataaaaatggaaagatgttgctttctgagagatcaggtggattcttgggcatttgcttaagcttggtaccttttttatgggccatatcctcatggagtttgggctgagctgggtctttctggtggccctgctgaagggagtccagtgtgagcagcagggggccagcaggccaggccccagggatgcccaggcccaccctggcagacccagggctgtgcccacccagtgtgatgtgcctcccaacagcagatttgactgtgcccctgataaggccattactcaggaacagtgtgaggccaggggctgctgctatatccctgccaagcagggcctgcagggggcccagatggggcagccctggtgcttcttcccccccagctacccctcttataagctggagaatctgagcagctctgaaatgggctacactgccactctgaccaggactacccccaccttcttccccaaggatattctgactctgaggctggatgtgatgatggagactgagaacaggctgcacttcaccatcaaggaccctgccaacaggaggtatgaggtgcccctggaaactcccagggtgcactctagggcccccagccccctgtattctgtggagttctctgaggagccttttggggtcattgtccacaggcagctggatggcagggtgctgctgaatactactgtggcccctctgttctttgctgaccagttcctgcagctgagcaccagcctgccttctcagtacattactggcctggctgagcatctgagccccctgatgctgagcacctcttggaccagaatcaccctgtggaacagggacctggctcccactcctggggccaacctgtatggcagccaccccttctacctggccctggaggatgggggctctgcccatggggtgttcctgctgaacagcaatgccatggatgtggtgctgcagccctctcctgccctgtcttggagatctactgggggcatcctggatgtgtatatcttcctggggcctgagcccaagtctgtggtgcagcagtacctggatgtggtgggctaccccttcatgcccccctactggggcctgggcttccacctgtgcaggtggggctactcttctactgctatcaccaggcaggtggtggagaacatgaccagggctcacttccctctggatgtgcagtggaatgacctggactacatggactctaggagagacttcacttttaataaggatgggttcagggactttcctgccatggtgcaggagctgcatcaggggggcaggagatatatgatgattgtggaccctgctatttctagctctggccctgctggcagctataggccctatgatgaggggctgaggaggggggtgttcatcactaatgagactggccagcccctgattggcaaggtgtggcctggctctactgccttccctgatttcaccaaccccactgccctggcctggtgggaggatatggtggctgagtttcatgaccaggtgccctttgatggcatgtggattgacatgaatgagcccagcaactttatcaggggctctgaagatggctgccccaacaatgagctggagaaccccccctatgtgcctggggtggtggggggcaccctgcaggctgccaccatctgtgccagcagccaccagttcctgagcacccactataacctgcacaacctgtatggcctgactgaggccattgcctctcacagggccctggtgaaggctagggggactaggccctttgtgatcagcaggtctacttttgctggccatggcaggtatgctgggcactggactggggatgtgtggtctagctgggagcagctggccagctctgtgcctgagatcctgcagtttaatctgctgggggtgcccctggtgggggctgatgtgtgtggcttcctgggcaatacctctgaggagctgtgtgtgaggtggactcagctgggggctttctaccccttcatgagaaaccacaactctctgctgagcctgccccaggagccctattctttttctgagcctgcccagcaggctatgaggaaggccctgactctgaggtatgccctgctgccccacctgtataccctgttccatcaggcccatgtggctggggagactgtggccagacctctgttcctggagttccccaaggatagctctacttggactgtggaccaccagctgctgtggggggaggctctgctgatcacccctgtgctgcaggctgggaaggctgaggtgactggctatttccccctgggcacctggtatgatctgcagactgtgcccattgaggccctgggctctctgccccctccccctgctgcccccagggagcctgccatccactctgagggccagtgggtgaccctgcctgcccctctggacactatcaatgtgcacctgagggctggctacatcatccccctgcagggccctggcctgactaccactgagtctaggcagcagcccatggccctggctgtggctctgaccaaggggggggaggccaggggggagctgttctgggatgatggggagtctctggaggtgctggagaggggggcctacacccaggtgatcttcctggctaggaataacaccattgtcaatgagctggtgagggtgacctctgagggggctggcctgcagctgcagaaggtgactgtgctgggggtggctactgccccccagcaggtgctgagcaatggggtgcctgtgagcaacttcacctatagccctgacaccaaggtgctggacatctgtgtgagcctgctgatgggggagcagttcctggtgagctggtgctaatttaaatctcgagccgggcggagtgtgttagtctctccagagggaggctggttccccagggaagcagagcctgtgtgcgggcagcagctgtgtgcgggcctgggggttgttaagtgcaattatttttaataaaaggggcatttggaaaaaaaaaaaaaaggtagcagtcgacagatgaattctgcagatctgtggcttctagctgcccgggtggcatccctgtgacccctccccagtgcctctcctggccctggaagttgccactccagtgcccaccagccttgtcctaataaaattaagttgcatcattttgtctgactaggtgtccttctataatattatggggtggaggggggtggtatggagcaaggggcaagttgggaagacaacctgtagggcctgcggggtctattgggaaccaagctggagtgcagtggcacaatcttggctcactgcaatctccgcctcctgggttcaagcgattctcctgcctcagcctcccgagttgttgggattccaggcatgcatgaccaggctcagctaatttttgtttttttggtagagacggggtttcaccatattggccaggctggtctccaactcctaatctcaggtgatctacccaccttggcctcccaaattgctgggattacaggcgtgaaccactgctcccttccctgtccttctgattttaaaaaaaagagaaatgttctggcacctgcacttgcactggggacagcctattttgctagtttgttttgtttcgttttgttttgatggagagcgtatgttgtttaaacgcggccgcgtagataagtagcatggcgggttaatcattaactacaaggaacccctagtgatggagttggccactccctctctgcgcgctcgctcgctcactgaggccgggcgaccaaaggtcgcccgacgcccgggctttgcccgggcggcctcagtgagcgagcgagcgcgcagttaattaaggcgccctaggccgacccttagactctgtactcagttctataaacgagccattggatacgagatccgtagattgataagggacacggaatatccccggacgcaatagacaccggtggacagcttggtatcctgagcacagtcgcgcgtccgaatctagctctactttagaggccccggattctgatggtcgtagaccgcagaaccgattggggggatgagatctactagttatcagcacacaattgcccattatacgcgcgtataatggactattgtgtgctgatatagggataacagggtaattctagagctagcatatggatccatcgatttgatgcggtattttctccttacgcatctgtgcggtatttcacaccgcatacgtcaaagcaaccatagtacgcgccctgtagcggcgcattaagcgcggcgggtgtggtggttacgcgcagcgtgaccgctacacttgccagcgccctagcgcccgctcctttcgctttcttcccttcctttctcgccacgttcgccggctttccccgtcaagctctaaatcgggggctccctttagggttccgatttagtgctttacggcacctcgaccccaaaaaacttgatttgggtgatggttcacgtagtgggccatcgccctgatagacggtttttcgccctttgacgttggagtccacgttctttaatagtggactcttgttccaaactggaacaacactcaactctatctcgggctattcttttgatttataagggattttgccgatttcggtctattggttaaaaaatgagctgatttaacaaaaatttaacgcgaattttaacaaaatattaacgtttacaattttatggtgcactctcagtacaatctgctctgatgccgcatagttaagccagccccgacacccgccaacacccgctgacgcgccctgacgggcttgtctgctcccggcatccgcttacagacaagctgtgaccgtctccgggagctgcatgtgtcagaggttttcaccgtcatcaccgaaacgcgcgagacgaaagggcctcgtgatacgcctatttttataggttaatgtcatgataataatggtttcttagacgtcaggtggcacttttcggggaaatgtgcgcggaacccctatttgtttatttttctaaatacattcaaatatgtatccgctcatgagacaataaccctgataaatgcttcaataatattgaaaaaggaagagtatgagccatattcaacgggaaacgtcgaggccgcgattaaattccaacatggatgctgatttatatgggtataaatgggctcgcgataatgtcgggcaatcaggtgcgacaatctatcgcttgtatgggaagcccgatgcgccagagttgtttctgaaacatggcaaaggtagcgttgccaatgatgttacagatgagatggtcagactaaactggctgacggaatttatgcctcttccgaccatcaagcattttatccgtactcctgatgatgcatggttactcaccactgcgatccccggaaaaacagcattccaggtattagaagaatatcctgattcaggtgaaaatattgttgatgcgctggcagtgttcctgcgccggttgcattcgattcctgtttgtaattgtccttttaacagcgatcgcgtatttcgtctcgctcaggcgcaatcacgaatgaataacggtttggttgatgcgagtgattttgatgacgagcgtaatggctggcctgttgaacaagtctggaaagaaatgcataaacttttgccattctcaccggattcagtcgtcactcatggtgatttctcacttgataaccttatttttgacgaggggaaattaataggttgtattgatgttggacgagtcggaatcgcagaccgataccaggatcttgccatcctatggaactgcctcggtgagttttctccttcattacagaaacggctttttcaaaaatatggtattgataatcctgatatgaataaattgcagtttcatttgatgctcgatgagtttttctaagcgtataatggtctagagctagcatatggatccatcgattccattatacgcctgtcagaccaagtttactcatatatactttagattgatttaaaacttcatttttaatttaaaaggatctaggtgaagatcctttttgataatctcatgaccaaaatcccttaacgtgagttttcgttccactgagcgtcagaccccgtagaaaagatcaaaggatcttcttgagatcctttttttctgcgcgtaatctgctgcttgcaaacaaaaaaaccaccgctaccagcggtggtttgtttgccggatcaagagctaccaactctttttccgaaggtaactggcttcagcagagcgcagataccaaatactgttcttctagtgtagccgtagttaggccaccacttcaagaactctgtagcaccgcctacatacctcgctctgctaatcctgttaccagtggctgctgccagtggcgataagtcgtgtcttaccgggttggactcaagacgatagttaccggataaggcgcagcggtcgggctgaacggggggttcgtgcacacagcccagcttggagcgaacgacctacaccgaactgagatacctacagcgtgagctatgagaaagcgccacgcttcccgaagggagaaaggcggacaggtatccggtaagcggcagggtcggaacaggagagcgcacgagggagcttccagggggaaacgcctggtatctttatagtcctgtcgggtttcgccacctctgacttgagcgtcgatttttgtgatgctcgtcaggggggcggagcctatggaaaaacgccagcaacgcggcctttttacggttcctggccttttgctggccttttgctcacatgt

SEQ ID NO: 474 - DNA, 7987 bp, synthetic construct
  source 1..7987: mol_type = other DNA
tctagagctagcatatggatccatcgatttagggataacagggtaattatcagcacacaattgcccattatacgcgcgtataatggactattgtgtgctgatatctgtacacttaagggctagatcttagcttacgtcactagagggtccacgtttagtttttaagatccattgatctcctaaacgctgcaagattcgcaacctggtatacttagcctaggcgctaggtcctagtgcagcgggactttttttctaaagtcgttgagaggaggagtcgtcagaccagatagctttgatgtcctgatcggaaggatcgttggcccccctgcaggcagctgttaattaactgcgcgctcgctcgctcactgaggccgcccgggcaaagcccgggcgtcgggcgacctttggtcgcccggcctcagtgagcgagcgagcgcgcagagagggagtggccaactccatcactaggggttccttgtagttaatgattaacccgccatgctacttatctacggcgcgccacgcgttctaggagttaatttttaaaaagcagtcaaaagtccaagtgcccttgcgagcatttactctctctgtttgctctggttaataatctcaggagcacaaacattccttactagttctaggagttaatttttaaaaagcagtcaaaagtccaagtgcccttgcgagcatttactctctctgtttgctctggttaataatctcaggagcacaaacattccttactagttctagagcggccgccagtgtgctggaattcggcttttttagggctggaagctacctttgacatcatttcctctgcgaatgcatgtataatttctacagaacctattagaaaggatcacccagcctctgcttttgtacaactttcccttaaaaaactgccaatcccactgctgtttggcccaatagtgagaactttttcctgctgcctcttggtgcttttgcctatggcccctattctgcctgctgaagacactcttgccagcatggacttaaacccctccagctctgacaatcctctttctcttttgttttacatgaagggtctggcagccaaagcaatcactcaaagttcaaaccttatcattttttgctttgttcctcttggccttggttttgtacatcagctttgaaaataccatcccagggttaatgctggggttaatttataactgagagtgctctagttctgcaatacaggacatgctataaaaatggaaagatgttgctttctgagagatcaggtggattcttgggcatttgcttaagcttggtaccttttttatgggacatattctcatgtacagaatgcagctgctgtcctgcattgcactgtcactggcactggttaccaactcacagcagggagcttctagacctggacctagagatgctcaggctcatcctggaagacctagagctgtgcctacacagtgtgatgtgcctcctaattctagatttgattgtgctcctgataaggctataacacaggagcagtgtgaggctagaggatgttgttatattcctgctaagcagggactgcagggagctcagatgggacagccttggtgtttttttcctccttcttatccttcttataagctggagaatctgtcttcttctgagatgggatatacagctacactgacaagaacaacacctacattttttcctaaggatattctgacactgagactggatgtgatgatggagacagagaatagactgcattttacaattaaggatcctgctaatagaagatatgaggtgcctctagagacacctagagtgcattctagagctccttctcctctgtattctgtggagttttctgaggagccttttggagtgattgtgcatagacagctggatggaagagtgctgctgaatacaacagtggctcctctgttttttgctgatcagtttctgcagctgtctacatctctgccttctcagtatattacaggactggctgagcatctgtctcctctgatgctgtctacatcttggacaagaattacactgtggaatagagatctggctcctacacctggagctaatctgtatggatctcatcctttttatctggctctggaggatggaggatctgctcatggagtgtttctgctgaattctaatgctatggatgtagtgctgcagccttctcctgctctgtcttggagatctacaggaggaattctggatgtgtatatttttctaggacctgagcctaagtctgtggtgcagcagtatctggatgtagtgggatatccttttatgcctccttattggggactgggatttcatctgtgtagatggggatattcttctacagctattacaagacaggtggttgagaatatgacaagagctcattttcctctggatgtgcagtggaatgatctagattatatggattctagaagagattttacatttaataaggatggatttagagattttcctgctatggtgcaggagctgcatcagggaggaagaagatatatgatgattgtggatcctgctatttcttcttctggacctgctggatcttatagaccttatgatgagggactgagaagaggagtgtttattacaaatgagacaggacagcctctgattggaaaggtgtggcctggatctacagcttttcctgattttacaaatcctacagctctggcttggtgggaggatatggtggctgagtttcatgatcaggtgccttttgatggaatgtggattgatatgaatgagccttctaattttataagaggatctgaggatggatgtcctaataatgagctagagaatcctccttatgtgcctggagtagtgggaggaacactgcaggctgctacaatttgtgcttcttctcatcagtttctgtctacacattataatctgcataatctgtatggactgacagaggctattgcttctcatagagctctggtgaaggctagaggaacaagaccttttgtgatttctagatctacatttgctggacatggaagatatgctggacattggacaggagatgtatggtcttcttgggagcagctagcttcttctgtgcctgagattctgcagtttaatctgctaggagtgcctctggtgggagctgatgtgtgtggatttctgggaaatacatctgaggagctgtgtgtgagatggacacagctgggagctttttatccttttatgagaaatcataattctctgctgtctctgcctcaggagccttattctttttctgagcctgctcagcaggctatgagaaaggctctgacactgagatatgctctgctgcctcatctgtatacactgtttcatcaggctcatgtggctggagagacagtagctagacctctgtttctggagtttcctaaggattcttctacatggacagttgatcatcagctgctgtggggagaggctctgctgattacacctgtgctgcaggctggaaaggctgaggtgacaggatattttcctctgggaacatggtatgatctgcagacagtgcctatagaggctctgggatctctgcctcctcctcctgctgctcctagagagcctgctattcattctgagggacagtgggtgacactgcctgctcctctggatacaattaatgtgcatctgagagctggatatattattcctctgcagggacctggactgacaacaacagagtctagacagcagcctatggctctggctgtggctctgacaaagggaggagaggctagaggagagctgttttgggatgatggagagtctctggaggtgctggagagaggagcttatacacaggtgatttttctggctagaaataatacaattgtgaatgagctggtgagagtgacatctgagggagctggactgcagctgcagaaggtgacagtgctgggagtggctacagctcctcagcaggtgctgtctaatggagtgcctgtgtctaattttacatattctcctgatacaaaggtgctggatatttgtgtgtctctgctgatgggagagcagtttctggtgtcttggtgttaatgatttaaatctcgagccgggcggagtgtgttagtctctccagagggaggctggttccccagggaagcagagcctgtgtgcgggcagcagctgtgtgcgggcctgggggttgttaagtgcaattatttttaataaaaggggcatttggaaaaaaaaaaaaaaggtagcagtcgacagatgaattctgcagatctgtggcttctagctgcccgggtggcatccctgtgacccctccccagtgcctctcctggccctggaagttgccactccagtgcccaccagccttgtcctaataaaattaagttgcatcattttgtctgactaggtgtccttctataatattatggggtggaggggggtggtatggagcaaggggcaagttgggaagacaacctgtagggcctgcggggtctattgggaaccaagctggagtgcagtggcacaatcttggctcactgcaatctccgcctcctgggttcaagcgattctcctgcctcagcctcccgagttgttgggattccaggcatgcatgaccaggctcagctaatttttgtttttttggtagagacggggtttcaccatattggccaggctggtctccaactcctaatctcaggtgatctacccaccttggcctcccaaattgctgggattacaggcgtgaaccactgctcccttccctgtccttctgattttaaaaaaaagagaaatgttctggcacctgcacttgcactggggacagcctattttgctagtttgttttgtttcgttttgttttgatggagagcgtatgttgtttaaacgcggccgcgtagataagtagcatggcgggttaatcattaactacaaggaacccctagtgatggagttggccactccctctctgcgcgctcgctcgctcactgaggccgggcgaccaaaggtcgcccgacgcccgggctttgcccgggcggcctcagtgagcgagcgagcgcgcagttaattaaggcgccctaggccgacccttagactctgtactcagttctataaacgagccattggatacgagatccgtagattgataagggacacggaatatccccggacgcaatagacaccggtggacagcttggtatcctgagcacagtcgcgcgtccgaatctagctctactttagaggccccggattctgatggtcgtagaccgcagaaccgattggggggatgagatctactagttatcagcacacaattgcccattatacgcgcgtataatggactattgtgtgctgatatagggataacagggtaattctagagctagcatatggatccatcgatttgatgcggtattttctccttacgcatctgtgcggtatttcacaccgcatacgtcaaagcaaccatagtacgcgccctgtagcggcgcattaagcgcggcgggtgtggtggttacgcgcagcgtgaccgctacacttgccagcgccctagcgcccgctcctttcgctttcttcccttcctttctcgccacgttcgccggctttccccgtcaagctctaaatcgggggctccctttagggttccgatttagtgctttacggcacctcgaccccaaaaaacttgatttgggtgatggttcacgtagtgggccatcgccctgatagacggtttttcgccctttgacgttggagtccacgttctttaatagtggactcttgttccaaactggaacaacactcaactctatctcgggctattcttttgatttataagggattttgccgatttcggtctattggttaaaaaatgagctgatttaacaaaaatttaacgcgaattttaacaaaatattaacgtttacaattttatggtgcactctcagtacaatctgctctgatgccgcatagttaagccagccccgacacccgccaacacccgctgacgcgccctgacgggcttgtctgctcccggcatccgcttacagacaagctgtgaccgtctccgggagctgcatgtgtcagaggttttcaccgtcatcaccgaaacgcgcgagacgaaagggcctcgtgatacgcctatttttataggttaatgtcatgataataatggtttcttagacgtcaggtggcacttttcggggaaatgtgcgcggaacccctatttgtttatttttctaaatacattcaaatatgtatccgctcatgagacaataaccctgataaatgcttcaataatattgaaaaaggaagagtatgagccatattcaacgggaaacgtcgaggccgcgattaaattccaacatggatgctgatttatatgggtataaatgggctcgcgataatgtcgggcaatcaggtgcgacaatctatcgcttgtatgggaagcccgatgcgccagagttgtttctgaaacatggcaaaggtagcgttgccaatgatgttacagatgagatggtcagactaaactggctgacggaatttatgcctcttccgaccatcaagcattttatccgtactcctgatgatgcatggttactcaccactgcgatccccggaaaaacagcattccaggtattagaagaatatcctgattcaggtgaaaatattgttgatgcgctggcagtgttcctgcgccggttgcattcgattcctgtttgtaattgtccttttaacagcgatcgcgtatttcgtctcgctcaggcgcaatcacgaatgaataacggtttggttgatgcgagtgattttgatgacgagcgtaatggctggcctgttgaacaagtctggaaagaaatgcataaacttttgccattctcaccggattcagtcgtcactcatggtgatttctcacttgataaccttatttttgacgaggggaaattaataggttgtattgatgttggacgagtcggaatcgcagaccgataccaggatcttgccatcctatggaactgcctcggtgagttttctccttcattacagaaacggctttttcaaaaatatggtattgataatcctgatatgaataaattgcagtttcatttgatgctcgatgagtttttctaagcgtataatggtctagagctagcatatggatccatcgattccattatacgcctgtcagaccaagtttactcatatatactttagattgatttaaaacttcatttttaatttaaaaggatctaggtgaagatcctttttgataatctcatgaccaaaatcccttaacgtgagttttcgttccactgagcgtcagaccccgtagaaaagatcaaaggatcttcttgagatcctttttttctgcgcgtaatctgctgcttgcaaacaaaaaaaccaccgctaccagcggtggtttgtttgccggatcaagagctaccaactctttttccgaaggtaactggcttcagcagagcgcagataccaaatactgttcttctagtgtagccgtagttaggccaccacttcaagaactctgtagcaccgcctacatacctcgctctgctaatcctgttaccagtggctgctgccagtggcgataagtcgtgtcttaccgggttggactcaagacgatagttaccggataaggcgcagcggtcgggctgaacggggggttcgtgcacacagcccagcttggagcgaacgacctacaccgaactgagatacctacagcgtgagctatgagaaagcgccacgcttcccgaagggagaaaggcggacaggtatccggtaagcggcagggtcggaacaggagagcgcacgagggagcttccagggggaaacgcctggtatctttatagtcctgtcgggtttcgccacctctgacttgagcgtcgatttttgtgatgctcgtcaggggggcggagcctatggaaaaacgccagcaacgcggcctttttacggttcctggccttttgctggccttttgctcacatgt

SEQ ID NO: 475 - DNA, 7987 bp, synthetic construct
  source 1..7987: mol_type = other DNA
tctagagctagcatatggatccatcgatttagggataacagggtaattatcagcacacaattgcccattatacgcgcgtataatggactattgtgtgctgatatctgtacacttaagggctagatcttagcttacgtcactagagggtccacgtttagtttttaagatccattgatctcctaaacgctgcaagattcgcaacctggtatacttagcctaggcgctaggtcctagtgcagcgggactttttttctaaagtcgttgagaggaggagtcgtcagaccagatagctttgatgtcctgatcggaaggatcgttggcccccctgcaggcagctgttaattaactgcgcgctcgctcgctcactgaggccgcccgggcaaagcccgggcgtcgggcgacctttggtcgcccggcctcagtgagcgagcgagcgcgcagagagggagtggccaactccatcactaggggttccttgtagttaatgattaacccgccatgctacttatctacggcgcgccacgcgttctaggagttaatttttaaaaagcagtcaaaagtccaagtgcccttgcgagcatttactctctctgtttgctctggttaataatctcaggagcacaaacattccttactagttctaggagttaatttttaaaaagcagtcaaaagtccaagtgcccttgcgagcatttactctctctgtttgctctggttaataatctcaggagcacaaacattccttactagttctagagcggccgccagtgtgctggaattcggcttttttagggctggaagctacctttgacatcatttcctctgcgaatgcatgtataatttctacagaacctattagaaaggatcacccagcctctgcttttgtacaactttcccttaaaaaactgccaatcccactgctgtttggcccaatagtgagaactttttcctgctgcctcttggtgcttttgcctatggcccctattctgcctgctgaagacactcttgccagcatggacttaaacccctccagctctgacaatcctctttctcttttgttttacatgaagggtctggcagccaaagcaatcactcaaagttcaaaccttatcattttttgctttgttcctcttggccttggttttgtacatcagctttgaaaataccatcccagggttaatgctggggttaatttataactgagagtgctctagttctgcaatacaggacatgctataaaaatggaaagatgttgctttctgagagatcaggtggattcttgggcatttgcttaagcttggtaccttttttatgggacatattctcatggagtttgggctgagctgggtctttctggtggccctgctgaagggagtccagtgtgagcagcagggagcttctagacctggacctagagatgctcaggctcatcctggaagacctagagctgtgcctacacagtgtgatgtgcctcctaattctagatttgattgtgctcctgataaggctataacacaggagcagtgtgaggctagaggatgttgttatattcctgctaagcagggactgcagggagctcagatgggacagccttggtgtttttttcctccttcttatccttcttataagctggagaatctgtcttcttctgagatgggatatacagctacactgacaagaacaacacctacattttttcctaaggatattctgacactgagactggatgtgatgatggagacagagaatagactgcattttacaattaaggatcctgctaatagaagatatgaggtgcctctagagacacctagagtgcattctagagctccttctcctctgtattctgtggagttttctgaggagccttttggagtgattgtgcatagacagctggatggaagagtgctgctgaatacaacagtggctcctctgttttttgctgatcagtttctgcagctgtctacatctctgccttctcagtatattacaggactggctgagcatctgtctcctctgatgctgtctacatcttggacaagaattacactgtggaatagagatctggctcctacacctggagctaatctgtatggatctcatcctttttatctggctctggaggatggaggatctgctcatggagtgtttctgctgaattctaatgctatggatgtagtgctgcagccttctcctgctctgtcttggagatctacaggaggaattctggatgtgtatatttttctaggacctgagcctaagtctgtggtgcagcagtatctggatgtagtgggatatccttttatgcctccttattggggactgggatttcatctgtgtagatggggatattcttctacagctattacaagacaggtggttgagaatatgacaagagctcattttcctctggatgtgcagtggaatgatctagattatatggattctagaagagattttacatttaataaggatggatttagagattttcctgctatggtgcaggagctgcatcagggaggaagaagatatatgatgattgtggatcctgctatttcttcttctggacctgctggatcttatagaccttatgatgagggactgagaagaggagtgtttattacaaatgagacaggacagcctctgattggaaaggtgtggcctggatctacagcttttcctgattttacaaatcctacagctctggcttggtgggaggatatggtggctgagtttcatgatcaggtgccttttgatggaatgtggattgatatgaatgagccttctaattttataagaggatctgaggatggatgtcctaataatgagctagagaatcctccttatgtgcctggagtagtgggaggaacactgcaggctgctacaatttgtgcttcttctcatcagtttctgtctacacattataatctgcataatctgtatggactgacagaggctattgcttctcatagagctctggtgaaggctagaggaacaagaccttttgtgatttctagatctacatttgctggacatggaagatatgctggacattggacaggagatgtatggtcttcttgggagcagctagcttcttctgtgcctgagattctgcagtttaatctgctaggagtgcctctggtgggagctgatgtgtgtggatttctgggaaatacatctgaggagctgtgtgtgagatggacacagctgggagctttttatccttttatgagaaatcataattctctgctgtctctgcctcaggagccttattctttttctgagcctgctcagcaggctatgagaaaggctctgacactgagatatgctctgctgcctcatctgtatacactgtttcatcaggctcatgtggctggagagacagtagctagacctctgtttctggagtttcctaaggattcttctacatggacagttgatcatcagctgctgtggggagaggctctgctgattacacctgtgctgcaggctggaaaggctgaggtgacaggatattttcctctgggaacatggtatgatctgcagacagtgcctatagaggctctgggatctctgcctcctcctcctgctgctcctagagagcctgctattcattctgagggacagtgggtgacactgcctgctcctctggatacaattaatgtgcatctgagagctggatatattattcctctgcagggacctggactgacaacaacagagtctagacagcagcctatggctctggctgtggctctgacaaagggaggagaggctagaggagagctgttttgggatgatggagagtctctggaggtgctggagagaggagcttatacacaggtgatttttctggctagaaataatacaattgtgaatgagctggtgagagtgacatctgagggagctggactgcagctgcagaaggtgacagtgctgggagtggctacagctcctcagcaggtgctgtctaatggagtgcctgtgtctaattttacatattctcctgatacaaaggtgctggatatttgtgtgtctctgctgatgggagagcagtttctggtgtcttggtgttaatgatttaaatctcgagccgggcggagtgtgttagtctctccagagggaggctggttccccagggaagcagagcctgtgtgcgggcagcagctgtgtgcgggcctgggggttgttaagtgcaattatttttaataaaaggggcatttggaaaaaaaaaaaaaaggtagcagtcgacagatgaattctgcagatctgtggcttctagctgcccgggtggcatccctgtgacccctccccagtgcctctcctggccctggaagttgccactccagtgcccaccagccttgtcctaataaaattaagttgcatcattttgtctgactaggtgtccttctataatattatggggtggaggggggtggtatggagcaaggggcaagttgggaagacaacctgtagggcctgcggggtctattgggaaccaagctggagtgcagtggcacaatcttggctcactgcaatctccgcctcctgggttcaagcgattctcctgcctcagcctcccgagttgttgggattccaggcatgcatgaccaggctcagctaatttttgtttttttggtagagacggggtttcaccatattggccaggctggtctccaactcctaatctcaggtgatctacccaccttggcctcccaaattgctgggattacaggcgtgaaccactgctcccttccctgtccttctgattttaaaaaaaagagaaatgttctggcacctgcacttgcactggggacagcctattttgctagtttgttttgtttcgttttgttttgatggagagcgtatgttgtttaaacgcggccgcgtagataagtagcatggcgggttaatcattaactacaaggaacccctagtgatggagttggccactccctctctgcgcgctcgctcgctcactgaggccgggcgaccaaaggtcgcccgacgcccgggctttgcccgggcggcctcagtgagcgagcgagcgcgcagttaattaaggcgccctaggccgacccttagactctgtactcagttctataaacgagccattggatacgagatccgtagattgataagggacacggaatatccccggacgcaatagacaccggtggacagcttggtatcctgagcacagtcgcgcgtccgaatctagctctactttagaggccccggattctgatggtcgtagaccgcagaaccgattggggggatgagatctactagttatcagcacacaattgcccattatacgcgcgtataatggactattgtgtgctgatatagggataacagggtaattctagagctagcatatggatccatcgatttgatgcggtattttctccttacgcatctgtgcggtatttcacaccgcatacgtcaaagcaaccatagtacgcgccctgtagcggcgcattaagcgcggcgggtgtggtggttacgcgcagcgtgaccgctacacttgccagcgccctagcgcccgctcctttcgctttcttcccttcctttctcgccacgttcgccggctttccccgtcaagctctaaatcgggggctccctttagggttccgatttagtgctttacggcacctcgaccccaaaaaacttgatttgggtgatggttcacgtagtgggccatcgccctgatagacggtttttcgccctttgacgttggagtccacgttctttaatagtggactcttgttccaaactggaacaacactcaactctatctcgggctattcttttgatttataagggattttgccgatttcggtctattggttaaaaaatgagctgatttaacaaaaatttaacgcgaattttaacaaaatattaacgtttacaattttatggtgcactctcagtacaatctgctctgatgccgcatagttaagccagccccgacacccgccaacacccgctgacgcgccctgacgggcttgtctgctcccggcatccgcttacagacaagctgtgaccgtctccgggagctgcatgtgtcagaggttttcaccgtcatcaccgaaacgcgcgagacgaaagggcctcgtgatacgcctatttttataggttaatgtcatgataataatggtttcttagacgtcaggtggcacttttcggggaaatgtgcgcggaacccctatttgtttatttttctaaatacattcaaatatgtatccgctcatgagacaataaccctgataaatgcttcaataatattgaaaaaggaagagtatgagccatattcaacgggaaacgtcgaggccgcgattaaattccaacatggatgctgatttatatgggtataaatgggctcgcgataatgtcgggcaatcaggtgcgacaatctatcgcttgtatgggaagcccgatgcgccagagttgtttctgaaacatggcaaaggtagcgttgccaatgatgttacagatgagatggtcagactaaactggctgacggaatttatgcctcttccgaccatcaagcattttatccgtactcctgatgatgcatggttactcaccactgcgatccccggaaaaacagcattccaggtattagaagaatatcctgattcaggtgaaaatattgttgatgcgctggcagtgttcctgcgccggttgcattcgattcctgtttgtaattgtccttttaacagcgatcgcgtatttcgtctcgctcaggcgcaatcacgaatgaataacggtttggttgatgcgagtgattttgatgacgagcgtaatggctggcctgttgaacaagtctggaaagaaatgcataaacttttgccattctcaccggattcagtcgtcactcatggtgatttctcacttgataaccttatttttgacgaggggaaattaataggttgtattgatgttggacgagtcggaatcgcagaccgataccaggatcttgccatcctatggaactgcctcggtgagttttctccttcattacagaaacggctttttcaaaaatatggtattgataatcctgatatgaataaattgcagtttcatttgatgctcgatgagtttttctaagcgtataatggtctagagctagcatatggatccatcgattccattatacgcctgtcagaccaagtttactcatatatactttagattgatttaaaacttcatttttaatttaaaaggatctaggtgaagatcctttttgataatctcatgaccaaaatcccttaacgtgagttttcgttccactgagcgtcagaccccgtagaaaagatcaaaggatcttcttgagatcctttttttctgcgcgtaatctgctgcttgcaaacaaaaaaaccaccgctaccagcggtggtttgtttgccggatcaagagctaccaactctttttccgaaggtaactggcttcagcagagcgcagataccaaatactgttcttctagtgtagccgtagttaggccaccacttcaagaactctgtagcaccgcctacatacctcgctctgctaatcctgttaccagtggctgctgccagtggcgataagtcgtgtcttaccgggttggactcaagacgatagttaccggataaggcgcagcggtcgggctgaacggggggttcgtgcacacagcccagcttggagcgaacgacctacaccgaactgagatacctacagcgtgagctatgagaaagcgccacgcttcccgaagggagaaaggcggacaggtatccggtaagcggcagggtcggaacaggagagcgcacgagggagcttccagggggaaacgcctggtatctttatagtcctgtcgggtttcgccacctctgacttgagcgtcgatttttgtgatgctcgtcaggggggcggagcctatggaaaaacgccagcaacgcggcctttttacggttcctggccttttgctggccttttgctcacatgt

SEQ ID NO: 476 - DNA, 8041 bp, synthetic construct
  source 1..8041: mol_type = other DNA
tctagagctagcatatggatccatcgatttagggataacagggtaattatcagcacacaattgcccattatacgcgcgtataatggactattgtgtgctgatatctgtacacttaagggctagatcttagcttacgtcactagagggtccacgtttagtttttaagatccattgatctcctaaacgctgcaagattcgcaacctggtatacttagcctaggcgctaggtcctagtgcagcgggactttttttctaaagtcgttgagaggaggagtcgtcagaccagatagctttgatgtcctgatcggaaggatcgttggcccccctgcaggcagctgttaattaactgcgcgctcgctcgctcactgaggccgcccgggcaaagcccgggcgtcgggcgacctttggtcgcccggcctcagtgagcgagcgagcgcgcagagagggagtggccaactccatcactaggggttccttgtagttaatgattaacccgccatgctacttatctacggcgcgccacgcgttctaggagttaatttttaaaaagcagtcaaaagtccaagtgcccttgcgagcatttactctctctgtttgctctggttaataatctcaggagcacaaacattccttactagttctaggagttaatttttaaaaagcagtcaaaagtccaagtgcccttgcgagcatttactctctctgtttgctctggttaataatctcaggagcacaaacattccttactagttctagagcggccgccagtgtgctggaattcggcttttttagggctggaagctacctttgacatcatttcctctgcgaatgcatgtataatttctacagaacctattagaaaggatcacccagcctctgcttttgtacaactttcccttaaaaaactgccaatcccactgctgtttggcccaatagtgagaactttttcctgctgcctcttggtgcttttgcctatggcccctattctgcctgctgaagacactcttgccagcatggacttaaacccctccagctctgacaatcctctttctcttttgttttacatgaagggtctggcagccaaagcaatcactcaaagttcaaaccttatcattttttgctttgttcctcttggccttggttttgtacatcagctttgaaaataccatcccagggttaatgctggggttaatttataactgagagtgctctagttctgcaatacaggacatgctataaaaatggaaagatgttgctttctgagagatcaggtggattcttgggcatttgcttaagcttggtaccttttttatgggggtgaggcaccctccctgttctcacaggctgctggctgtgtgtgctctggtgtctctggccactgccatgtacagaatgcagctgctgtcctgcattgcactgtcactggcactggttaccaactcacagcagggggccagcaggccaggccccagggatgcccaggcccaccctggcagacccagggctgtgcccacccagtgtgatgtgcctcccaacagcagatttgactgtgcccctgataaggccattactcaggaacagtgtgaggccaggggctgctgctatatccctgccaagcagggcctgcagggggcccagatggggcagccctggtgcttcttcccccccagctacccctcttataagctggagaatctgagcagctctgaaatgggctacactgccactctgaccaggactacccccaccttcttccccaaggatattctgactctgaggctggatgtgatgatggagactgagaacaggctgcacttcaccatcaaggaccctgccaacaggaggtatgaggtgcccctggaaactcccagggtgcactctagggcccccagccccctgtattctgtggagttctctgaggagccttttggggtcattgtccacaggcagctggatggcagggtgctgctgaatactactgtggcccctctgttctttgctgaccagttcctgcagctgagcaccagcctgccttctcagtacattactggcctggctgagcatctgagccccctgatgctgagcacctcttggaccagaatcaccctgtggaacagggacctggctcccactcctggggccaacctgtatggcagccaccccttctacctggccctggaggatgggggctctgcccatggggtgttcctgctgaacagcaatgccatggatgtggtgctgcagccctctcctgccctgtcttggagatctactgggggcatcctggatgtgtatatcttcctggggcctgagcccaagtctgtggtgcagcagtacctggatgtggtgggctaccccttcatgcccccctactggggcctgggcttccacctgtgcaggtggggctactcttctactgctatcaccaggcaggtggtggagaacatgaccagggctcacttccctctggatgtgcagtggaatgacctggactacatggactctaggagagacttcacttttaataaggatgggttcagggactttcctgccatggtgcaggagctgcatcaggggggcaggagatatatgatgattgtggaccctgctatttctagctctggccctgctggcagctataggccctatgatgaggggctgaggaggggggtgttcatcactaatgagactggccagcccctgattggcaaggtgtggcctggctctactgccttccctgatttcaccaaccccactgccctggcctggtgggaggatatggtggctgagtttcatgaccaggtgccctttgatggcatgtggattgacatgaatgagcccagcaactttatcaggggctctgaagatggctgccccaacaatgagctggagaaccccccctatgtgcctggggtggtggggggcaccctgcaggctgccaccatctgtgccagcagccaccagttcctgagcacccactataacctgcacaacctgtatggcctgactgaggccattgcctctcacagggccctggtgaaggctagggggactaggccctttgtgatcagcaggtctacttttgctggccatggcaggtatgctgggcactggactggggatgtgtggtctagctgggagcagctggccagctctgtgcctgagatcctgcagtttaatctgctgggggtgcccctggtgggggctgatgtgtgtggcttcctgggcaatacctctgaggagctgtgtgtgaggtggactcagctgggggctttctaccccttcatgagaaaccacaactctctgctgagcctgccccaggagccctattctttttctgagcctgcccagcaggctatgaggaaggccctgactctgaggtatgccctgctgccccacctgtataccctgttccatcaggcccatgtggctggggagactgtggccagacctctgttcctggagttccccaaggatagctctacttggactgtggaccaccagctgctgtggggggaggctctgctgatcacccctgtgctgcaggctgggaaggctgaggtgactggctatttccccctgggcacctggtatgatctgcagactgtgcccattgaggccctgggctctctgccccctccccctgctgcccccagggagcctgccatccactctgagggccagtgggtgaccctgcctgcccctctggacactatcaatgtgcacctgagggctggctacatcatccccctgcagggccctggcctgactaccactgagtctaggcagcagcccatggccctggctgtggctctgaccaaggggggggaggccaggggggagctgttctgggatgatggggagtctctggaggtgctggagaggggggcctacacccaggtgatcttcctggctaggaataacaccattgtcaatgagctggtgagggtgacctctgagggggctggcctgcagctgcagaaggtgactgtgctgggggtggctactgccccccagcaggtgctgagcaatggggtgcctgtgagcaacttcacctatagccctgacaccaaggtgctggacatctgtgtgagcctgctgatgggggagcagttcctggtgagctggtgctaatttaaatctcgagccgggcggagtgtgttagtctctccagagggaggctggttccccagggaagcagagcctgtgtgcgggcagcagctgtgtgcgggcctgggggttgttaagtgcaattatttttaataaaaggggcatttggaaaaaaaaaaaaaaggtagcagtcgacagatgaattctgcagatctgtggcttctagctgcccgggtggcatccctgtgacccctccccagtgcctctcctggccctggaagttgccactccagtgcccaccagccttgtcctaataaaattaagttgcatcattttgtctgactaggtgtccttctataatattatggggtggaggggggtggtatggagcaaggggcaagttgggaagacaacctgtagggcctgcggggtctattgggaaccaagctggagtgcagtggcacaatcttggctcactgcaatctccgcctcctgggttcaagcgattctcctgcctcagcctcccgagttgttgggattccaggcatgcatgaccaggctcagctaatttttgtttttttggtagagacggggtttcaccatattggccaggctggtctccaactcctaatctcaggtgatctacccaccttggcctcccaaattgctgggattacaggcgtgaaccactgctcccttccctgtccttctgattttaaaaaaaagagaaatgttctggcacctgcacttgcactggggacagcctattttgctagtttgttttgtttcgttttgttttgatggagagcgtatgttgtttaaacgcggccgcgtagataagtagcatggcgggttaatcattaactacaaggaacccctagtgatggagttggccactccctctctgcgcgctcgctcgctcactgaggccgggcgaccaaaggtcgcccgacgcccgggctttgcccgggcggcctcagtgagcgagcgagcgcgcagttaattaaggcgccctaggccgacccttagactctgtactcagttctataaacgagccattggatacgagatccgtagattgataagggacacggaatatccccggacgcaatagacaccggtggacagcttggtatcctgagcacagtcgcgcgtccgaatctagctctactttagaggccccggattctgatggtcgtagaccgcagaaccgattggggggatgagatctactagttatcagcacacaattgcccattatacgcgcgtataatggactattgtgtgctgatatagggataacagggtaattctagagctagcatatggatccatcgatttgatgcggtattttctccttacgcatctgtgcggtatttcacaccgcatacgtcaaagcaaccatagtacgcgccctgtagcggcgcattaagcgcggcgggtgtggtggttacgcgcagcgtgaccgctacacttgccagcgccctagcgcccgctcctttcgctttcttcccttcctttctcgccacgttcgccggctttccccgtcaagctctaaatcgggggctccctttagggttccgatttagtgctttacggcacctcgaccccaaaaaacttgatttgggtgatggttcacgtagtgggccatcgccctgatagacggtttttcgccctttgacgttggagtccacgttctttaatagtggactcttgttccaaactggaacaacactcaactctatctcgggctattcttttgatttataagggattttgccgatttcggtctattggttaaaaaatgagctgatttaacaaaaatttaacgcgaattttaacaaaatattaacgtttacaattttatggtgcactctcagtacaatctgctctgatgccgcatagttaagccagccccgacacccgccaacacccgctgacgcgccctgacgggcttgtctgctcccggcatccgcttacagacaagctgtgaccgtctccgggagctgcatgtgtcagaggttttcaccgtcatcaccgaaacgcgcgagacgaaagggcctcgtgatacgcctatttttataggttaatgtcatgataataatggtttcttagacgtcaggtggcacttttcggggaaatgtgcgcggaacccctatttgtttatttttctaaatacattcaaatatgtatccgctcatgagacaataaccctgataaatgcttcaataatattgaaaaaggaagagtatgagccatattcaacgggaaacgtcgaggccgcgattaaattccaacatggatgctgatttatatgggtataaatgggctcgcgataatgtcgggcaatcaggtgcgacaatctatcgcttgtatgggaagcccgatgcgccagagttgtttctgaaacatggcaaaggtagcgttgccaatgatgttacagatgagatggtcagactaaactggctgacggaatttatgcctcttccgaccatcaagcattttatccgtactcctgatgatgcatggttactcaccactgcgatccccggaaaaacagcattccaggtattagaagaatatcctgattcaggtgaaaatattgttgatgcgctggcagtgttcctgcgccggttgcattcgattcctgtttgtaattgtccttttaacagcgatcgcgtatttcgtctcgctcaggcgcaatcacgaatgaataacggtttggttgatgcgagtgattttgatgacgagcgtaatggctggcctgttgaacaagtctggaaagaaatgcataaacttttgccattctcaccggattcagtcgtcactcatggtgatttctcacttgataaccttatttttgacgaggggaaattaataggttgtattgatgttggacgagtcggaatcgcagaccgataccaggatcttgccatcctatggaactgcctcggtgagttttctccttcattacagaaacggctttttcaaaaatatggtattgataatcctgatatgaataaattgcagtttcatttgatgctcgatgagtttttctaagcgtataatggtctagagctagcatatggatccatcgattccattatacgcctgtcagaccaagtttactcatatatactttagattgatttaaaacttcatttttaatttaaaaggatctaggtgaagatcctttttgataatctcatgaccaaaatcccttaacgtgagttttcgttccactgagcgtcagaccccgtagaaaagatcaaaggatcttcttgagatcctttttttctgcgcgtaatctgctgcttgcaaacaaaaaaaccaccgctaccagcggtggtttgtttgccggatcaagagctaccaactctttttccgaaggtaactggcttcagcagagcgcagataccaaatactgttcttctagtgtagccgtagttaggccaccacttcaagaactctgtagcaccgcctacatacctcgctctgctaatcctgttaccagtggctgctgccagtggcgataagtcgtgtcttaccgggttggactcaagacgatagttaccggataaggcgcagcggtcgggctgaacggggggttcgtgcacacagcccagcttggagcgaacgacctacaccgaactgagatacctacagcgtgagctatgagaaagcgccacgcttcccgaagggagaaaggcggacaggtatccggtaagcggcagggtcggaacaggagagcgcacgagggagcttccagggggaaacgcctggtatctttatagtcctgtcgggtttcgccacctctgacttgagcgtcgatttttgtgatgctcgtcaggggggcggagcctatggaaaaacgccagcaacgcggcctttttacggttcctggccttttgctggccttttgctcacatgt

SEQ ID NO: 477 - DNA, 8041 bp, synthetic construct
  source 1..8041: mol_type = other DNA
tctagagctagcatatggatccatcgatttagggataacagggtaattatcagcacacaattgcccattatacgcgcgtataatggactattgtgtgctgatatctgtacacttaagggctagatcttagcttacgtcactagagggtccacgtttagtttttaagatccattgatctcctaaacgctgcaagattcgcaacctggtatacttagcctaggcgctaggtcctagtgcagcgggactttttttctaaagtcgttgagaggaggagtcgtcagaccagatagctttgatgtcctgatcggaaggatcgttggcccccctgcaggcagctgttaattaactgcgcgctcgctcgctcactgaggccgcccgggcaaagcccgggcgtcgggcgacctttggtcgcccggcctcagtgagcgagcgagcgcgcagagagggagtggccaactccatcactaggggttccttgtagttaatgattaacccgccatgctacttatctacggcgcgccacgcgttctaggagttaatttttaaaaagcagtcaaaagtccaagtgcccttgcgagcatttactctctctgtttgctctggttaataatctcaggagcacaaacattccttactagttctaggagttaatttttaaaaagcagtcaaaagtccaagtgcccttgcgagcatttactctctctgtttgctctggttaataatctcaggagcacaaacattccttactagttctagagcggccgccagtgtgctggaattcggcttttttagggctggaagctacctttgacatcatttcctctgcgaatgcatgtataatttctacagaacctattagaaaggatcacccagcctctgcttttgtacaactttcccttaaaaaactgccaatcccactgctgtttggcccaatagtgagaactttttcctgctgcctcttggtgcttttgcctatggcccctattctgcctgctgaagacactcttgccagcatggacttaaacccctccagctctgacaatcctctttctcttttgttttacatgaagggtctggcagccaaagcaatcactcaaagttcaaaccttatcattttttgctttgttcctcttggccttggttttgtacatcagctttgaaaataccatcccagggttaatgctggggttaatttataactgagagtgctctagttctgcaatacaggacatgctataaaaatggaaagatgttgctttctgagagatcaggtggattcttgggcatttgcttaagcttggtaccttttttatgggggtgaggcaccctccctgttctcacaggctgctggctgtgtgtgctctggtgtctctggccactgccatggagtttgggctgagctgggtctttctggtggccctgctgaagggagtccagtgtgagcagcagggggccagcaggccaggccccagggatgcccaggcccaccctggcagacccagggctgtgcccacccagtgtgatgtgcctcccaacagcagatttgactgtgcccctgataaggccattactcaggaacagtgtgaggccaggggctgctgctatatccctgccaagcagggcctgcagggggcccagatggggcagccctggtgcttcttcccccccagctacccctcttataagctggagaatctgagcagctctgaaatgggctacactgccactctgaccaggactacccccaccttcttccccaaggatattctgactctgaggctggatgtgatgatggagactgagaacaggctgcacttcaccatcaaggaccctgccaacaggaggtatgaggtgcccctggaaactcccagggtgcactctagggcccccagccccctgtattctgtggagttctctgaggagccttttggggtcattgtccacaggcagctggatggcagggtgctgctgaatactactgtggcccctctgttctttgctgaccagttcctgcagctgagcaccagcctgccttctcagtacattactggcctggctgagcatctgagccccctgatgctgagcacctcttggaccagaatcaccctgtggaacagggacctggctcccactcctggggccaacctgtatggcagccaccccttctacctggccctggaggatgggggctctgcccatggggtgttcctgctgaacagcaatgccatggatgtggtgctgcagccctctcctgccctgtcttggagatctactgggggcatcctggatgtgtatatcttcctggggcctgagcccaagtctgtggtgcagcagtacctggatgtggtgggctaccccttcatgcccccctactggggcctgggcttccacctgtgcaggtggggctactcttctactgctatcaccaggcaggtggtggagaacatgaccagggctcacttccctctggatgtgcagtggaatgacctggactacatggactctaggagagacttcacttttaataaggatgggttcagggactttcctgccatggtgcaggagctgcatcaggggggcaggagatatatgatgattgtggaccctgctatttctagctctggccctgctggcagctataggccctatgatgaggggctgaggaggggggtgttcatcactaatgagactggccagcccctgattggcaaggtgtggcctggctctactgccttccctgatttcaccaaccccactgccctggcctggtgggaggatatggtggctgagtttcatgaccaggtgccctttgatggcatgtggattgacatgaatgagcccagcaactttatcaggggctctgaagatggctgccccaacaatgagctggagaaccccccctatgtgcctggggtggtggggggcaccctgcaggctgccaccatctgtgccagcagccaccagttcctgagcacccactataacctgcacaacctgtatggcctgactgaggccattgcctctcacagggccctggtgaaggctagggggactaggccctttgtgatcagcaggtctacttttgctggccatggcaggtatgctgggcactggactggggatgtgtggtctagctgggagcagctggccagctctgtgcctgagatcctgcagtttaatctgctgggggtgcccctggtgggggctgatgtgtgtggcttcctgggcaatacctctgaggagctgtgtgtgaggtggactcagctgggggctttctaccccttcatgagaaaccacaactctctgctgagcctgccccaggagccctattctttttctgagcctgcccagcaggctatgaggaaggccctgactctgaggtatgccctgctgccccacctgtataccctgttccatcaggcccatgtggctggggagactgtggccagacctctgttcctggagttccccaaggatagctctacttggactgtggaccaccagctgctgtggggggaggctctgctgatcacccctgtgctgcaggctgggaaggctgaggtgactggctatttccccctgggcacctggtatgatctgcagactgtgcccattgaggccctgggctctctgccccctccccctgctgcccccagggagcctgccatccactctgagggccagtgggtgaccctgcctgcccctctggacactatcaatgtgcacctgagggctggctacatcatccccctgcagggccctggcctgactaccactgagtctaggcagcagcccatggccctggctgtggctctgaccaaggggggggaggccaggggggagctgttctgggatgatggggagtctctggaggtgctggagaggggggcctacacccaggtgatcttcctggctaggaataacaccattgtcaatgagctggtgagggtgacctctgagggggctggcctgcagctgcagaaggtgactgtgctgggggtggctactgccccccagcaggtgctgagcaatggggtgcctgtgagcaacttcacctatagccctgacaccaaggtgctggacatctgtgtgagcctgctgatgggggagcagttcctggtgagctggtgctaatttaaatctcgagccgggcggagtgtgttagtctctccagagggaggctggttccccagggaagcagagcctgtgtgcgggcagcagctgtgtgcgggcctgggggttgttaagtgcaattatttttaataaaaggggcatttggaaaaaaaaaaaaaaggtagcagtcgacagatgaattctgcagatctgtggcttctagctgcccgggtggcatccctgtgacccctccccagtgcctctcctggccctggaagttgccactccagtgcccaccagccttgtcctaataaaattaagttgcatcattttgtctgactaggtgtccttctataatattatggggtggaggggggtggtatggagcaaggggcaagttgggaagacaacctgtagggcctgcggggtctattgggaaccaagctggagtgcagtggcacaatcttggctcactgcaatctccgcctcctgggttcaagcgattctcctgcctcagcctcccgagttgttgggattccaggcatgcatgaccaggctcagctaatttttgtttttttggtagagacggggtttcaccatattggccaggctggtctccaactcctaatctcaggtgatctacccaccttggcctcccaaattgctgggattacaggcgtgaaccactgctcccttccctgtccttctgattttaaaaaaaagagaaatgttctggcacctgcacttgcactggggacagcctattttgctagtttgttttgtttcgttttgttttgatggagagcgtatgttgtttaaacgcggccgcgtagataagtagcatggcgggttaatcattaactacaaggaacccctagtgatggagttggccactccctctctgcgcgctcgctcgctcactgaggccgggcgaccaaaggtcgcccgacgcccgggctttgcccgggcggcctcagtgagcgagcgagcgcgcagttaattaaggcgccctaggccgacccttagactctgtactcagttctataaacgagccattggatacgagatccgtagattgataagggacacggaatatccccggacgcaatagacaccggtggacagcttggtatcctgagcacagtcgcgcgtccgaatctagctctactttagaggccccggattctgatggtcgtagaccgcagaaccgattggggggatgagatctactagttatcagcacacaattgcccattatacgcgcgtataatggactattgtgtgctgatatagggataacagggtaattctagagctagcatatggatccatcgatttgatgcggtattttctccttacgcatctgtgcggtatttcacaccgcatacgtcaaagcaaccatagtacgcgccctgtagcggcgcattaagcgcggcgggtgtggtggttacgcgcagcgtgaccgctacacttgccagcgccctagcgcccgctcctttcgctttcttcccttcctttctcgccacgttcgccggctttccccgtcaagctctaaatcgggggctccctttagggttccgatttagtgctttacggcacctcgaccccaaaaaacttgatttgggtgatggttcacgtagtgggccatcgccctgatagacggtttttcgccctttgacgttggagtccacgttctttaatagtggactcttgttccaaactggaacaacactcaactctatctcgggctattcttttgatttataagggattttgccgatttcggtctattggttaaaaaatgagctgatttaacaaaaatttaacgcgaattttaacaaaatattaacgtttacaattttatggtgcactctcagtacaatctgctctgatgccgcatagttaagccagccccgacacccgccaacacccgctgacgcgccctgacgggcttgtctgctcccggcatccgcttacagacaagctgtgaccgtctccgggagctgcatgtgtcagaggttttcaccgtcatcaccgaaacgcgcgagacgaaagggcctcgtgatacgcctatttttataggttaatgtcatgataataatggtttcttagacgtcaggtggcacttttcggggaaatgtgcgcggaacccctatttgtttatttttctaaatacattcaaatatgtatccgctcatgagacaataaccctgataaatgcttcaataatattgaaaaaggaagagtatgagccatattcaacgggaaacgtcgaggccgcgattaaattccaacatggatgctgatttatatgggtataaatgggctcgcgataatgtcgggcaatcaggtgcgacaatctatcgcttgtatgggaagcccgatgcgccagagttgtttctgaaacatggcaaaggtagcgttgccaatgatgttacagatgagatggtcagactaaactggctgacggaatttatgcctcttccgaccatcaagcattttatccgtactcctgatgatgcatggttactcaccactgcgatccccggaaaaacagcattccaggtattagaagaatatcctgattcaggtgaaaatattgttgatgcgctggcagtgttcctgcgccggttgcattcgattcctgtttgtaattgtccttttaacagcgatcgcgtatttcgtctcgctcaggcgcaatcacgaatgaataacggtttggttgatgcgagtgattttgatgacgagcgtaatggctggcctgttgaacaagtctggaaagaaatgcataaacttttgccattctcaccggattcagtcgtcactcatggtgatttctcacttgataaccttatttttgacgaggggaaattaataggttgtattgatgttggacgagtcggaatcgcagaccgataccaggatcttgccatcctatggaactgcctcggtgagttttctccttcattacagaaacggctttttcaaaaatatggtattgataatcctgatatgaataaattgcagtttcatttgatgctcgatgagtttttctaagcgtataatggtctagagctagcatatggatccatcgattccattatacgcctgtcagaccaagtttactcatatatactttagattgatttaaaacttcatttttaatttaaaaggatctaggtgaagatcctttttgataatctcatgaccaaaatcccttaacgtgagttttcgttccactgagcgtcagaccccgtagaaaagatcaaaggatcttcttgagatcctttttttctgcgcgtaatctgctgcttgcaaacaaaaaaaccaccgctaccagcggtggtttgtttgccggatcaagagctaccaactctttttccgaaggtaactggcttcagcagagcgcagataccaaatactgttcttctagtgtagccgtagttaggccaccacttcaagaactctgtagcaccgcctacatacctcgctctgctaatcctgttaccagtggctgctgccagtggcgataagtcgtgtcttaccgggttggactcaagacgatagttaccggataaggcgcagcggtcgggctgaacggggggttcgtgcacacagcccagcttggagcgaacgacctacaccgaactgagatacctacagcgtgagctatgagaaagcgccacgcttcccgaagggagaaaggcggacaggtatccggtaagcggcagggtcggaacaggagagcgcacgagggagcttccagggggaaacgcctggtatctttatagtcctgtcgggtttcgccacctctgacttgagcgtcgatttttgtgatgctcgtcaggggggcggagcctatggaaaaacgccagcaacgcggcctttttacggttcctggccttttgctggccttttgctcacatgt

SEQ ID NO: 478 - DNA, 8044 bp, synthetic construct
  source 1..8044: mol_type = other DNA
tctagagctagcatatggatccatcgatttagggataacagggtaattatcagcacacaattgcccattatacgcgcgtataatggactattgtgtgctgatatctgtacacttaagggctagatcttagcttacgtcactagagggtccacgtttagtttttaagatccattgatctcctaaacgctgcaagattcgcaacctggtatacttagcctaggcgctaggtcctagtgcagcgggactttttttctaaagtcgttgagaggaggagtcgtcagaccagatagctttgatgtcctgatcggaaggatcgttggcccccctgcaggcagctgttaattaactgcgcgctcgctcgctcactgaggccgcccgggcaaagcccgggcgtcgggcgacctttggtcgcccggcctcagtgagcgagcgagcgcgcagagagggagtggccaactccatcactaggggttccttgtagttaatgattaacccgccatgctacttatctacggcgcgccacgcgttctaggagttaatttttaaaaagcagtcaaaagtccaagtgcccttgcgagcatttactctctctgtttgctctggttaataatctcaggagcacaaacattccttactagttctaggagttaatttttaaaaagcagtcaaaagtccaagtgcccttgcgagcatttactctctctgtttgctctggttaataatctcaggagcacaaacattccttactagttctagagcggccgccagtgtgctggaattcggcttttttagggctggaagctacctttgacatcatttcctctgcgaatgcatgtataatttctacagaacctattagaaaggatcacccagcctctgcttttgtacaactttcccttaaaaaactgccaatcccactgctgtttggcccaatagtgagaactttttcctgctgcctcttggtgcttttgcctatggcccctattctgcctgctgaagacactcttgccagcatggacttaaacccctccagctctgacaatcctctttctcttttgttttacatgaagggtctggcagccaaagcaatcactcaaagttcaaaccttatcattttttgctttgttcctcttggccttggttttgtacatcagctttgaaaataccatcccagggttaatgctggggttaatttataactgagagtgctctagttctgcaatacaggacatgctataaaaatggaaagatgttgctttctgagagatcaggtggattcttgggcatttgcttaagcttggtaccttttttatgggagtgagacatcctccttgttctcatagactgctggctgtgtgtgctctggtgtctctggctacagccatgtacagaatgcagctgctgtcctgcattgcactgtcactggcactggttaccaactcacagcagggagcttctagacctggacctagagatgctcaggctcatcctggaagacctagagctgtgcctacacagtgtgatgtgcctcctaattctagatttgattgtgctcctgataaggctataacacaggagcagtgtgaggctagaggatgttgttatattcctgctaagcagggactgcagggagctcagatgggacagccttggtgtttttttcctccttcttatccttcttataagctggagaatctgtcttcttctgagatgggatatacagctacactgacaagaacaacacctacattttttcctaaggatattctgacactgagactggatgtgatgatggagacagagaatagactgcattttacaattaaggatcctgctaatagaagatatgaggtgcctctagagacacctagagtgcattctagagctccttctcctctgtattctgtggagttttctgaggagccttttggagtgattgtgcatagacagctggatggaagagtgctgctgaatacaacagtggctcctctgttttttgctgatcagtttctgcagctgtctacatctctgccttctcagtatattacaggactggctgagcatctgtctcctctgatgctgtctacatcttggacaagaattacactgtggaatagagatctggctcctacacctggagctaatctgtatggatctcatcctttttatctggctctggaggatggaggatctgctcatggagtgtttctgctgaattctaatgctatggatgtagtgctgcagccttctcctgctctgtcttggagatctacaggaggaattctggatgtgtatatttttctaggacctgagcctaagtctgtggtgcagcagtatctggatgtagtgggatatccttttatgcctccttattggggactgggatttcatctgtgtagatggggatattcttctacagctattacaagacaggtggttgagaatatgacaagagctcattttcctctggatgtgcagtggaatgatctagattatatggattctagaagagattttacatttaataaggatggatttagagattttcctgctatggtgcaggagctgcatcagggaggaagaagatatatgatgattgtggatcctgctatttcttcttctggacctgctggatcttatagaccttatgatgagggactgagaagaggagtgtttattacaaatgagacaggacagcctctgattggaaaggtgtggcctggatctacagcttttcctgattttacaaatcctacagctctggcttggtgggaggatatggtggctgagtttcatgatcaggtgccttttgatggaatgtggattgatatgaatgagccttctaattttataagaggatctgaggatggatgtcctaataatgagctagagaatcctccttatgtgcctggagtagtgggaggaacactgcaggctgctacaatttgtgcttcttctcatcagtttctgtctacacattataatctgcataatctgtatggactgacagaggctattgcttctcatagagctctggtgaaggctagaggaacaagaccttttgtgatttctagatctacatttgctggacatggaagatatgctggacattggacaggagatgtatggtcttcttgggagcagctagcttcttctgtgcctgagattctgcagtttaatctgctaggagtgcctctggtgggagctgatgtgtgtggatttctgggaaatacatctgaggagctgtgtgtgagatggacacagctgggagctttttatccttttatgagaaatcataattctctgctgtctctgcctcaggagccttattctttttctgagcctgctcagcaggctatgagaaaggctctgacactgagatatgctctgctgcctcatctgtatacactgtttcatcaggctcatgtggctggagagacagtagctagacctctgtttctggagtttcctaaggattcttctacatggacagttgatcatcagctgctgtggggagaggctctgctgattacacctgtgctgcaggctggaaaggctgaggtgacaggatattttcctctgggaacatggtatgatctgcagacagtgcctatagaggctctgggatctctgcctcctcctcctgctgctcctagagagcctgctattcattctgagggacagtgggtgacactgcctgctcctctggatacaattaatgtgcatctgagagctggatatattattcctctgcagggacctggactgacaacaacagagtctagacagcagcctatggctctggctgtggctctgacaaagggaggagaggctagaggagagctgttttgggatgatggagagtctctggaggtgctggagagaggagcttatacacaggtgatttttctggctagaaataatacaattgtgaatgagctggtgagagtgacatctgagggagctggactgcagctgcagaaggtgacagtgctgggagtggctacagctcctcagcaggtgctgtctaatggagtgcctgtgtctaattttacatattctcctgatacaaaggtgctggatatttgtgtgtctctgctgatgggagagcagtttctggtgtcttggtgttaatgatttaaatctcgagccgggcggagtgtgttagtctctccagagggaggctggttccccagggaagcagagcctgtgtgcgggcagcagctgtgtgcgggcctgggggttgttaagtgcaattatttttaataaaaggggcatttggaaaaaaaaaaaaaaggtagcagtcgacagatgaattctgcagatctgtggcttctagctgcccgggtggcatccctgtgacccctccccagtgcctctcctggccctggaagttgccactccagtgcccaccagccttgtcctaataaaattaagttgcatcattttgtctgactaggtgtccttctataatattatggggtggaggggggtggtatggagcaaggggcaagttgggaagacaacctgtagggcctgcggggtctattgggaaccaagctggagtgcagtggcacaatcttggctcactgcaatctccgcctcctgggttcaagcgattctcctgcctcagcctcccgagttgttgggattccaggcatgcatgaccaggctcagctaatttttgtttttttggtagagacggggtttcaccatattggccaggctggtctccaactcctaatctcaggtgatctacccaccttggcctcccaaattgctgggattacaggcgtgaaccactgctcccttccctgtccttctgattttaaaaaaaagagaaatgttctggcacctgcacttgcactggggacagcctattttgctagtttgttttgtttcgttttgttttgatggagagcgtatgttgtttaaacgcggccgcgtagataagtagcatggcgggttaatcattaactacaaggaacccctagtgatggagttggccactccctctctgcgcgctcgctcgctcactgaggccgggcgaccaaaggtcgcccgacgcccgggctttgcccgggcggcctcagtgagcgagcgagcgcgcagttaattaaggcgccctaggccgacccttagactctgtactcagttctataaacgagccattggatacgagatccgtagattgataagggacacggaatatccccggacgcaatagacaccggtggacagcttggtatcctgagcacagtcgcgcgtccgaatctagctctactttagaggccccggattctgatggtcgtagaccgcagaaccgattggggggatgagatctactagttatcagcacacaattgcccattatacgcgcgtataatggactattgtgtgctgatatagggataacagggtaattctagagctagcatatggatccatcgatttgatgcggtattttctccttacgcatctgtgcggtatttcacaccgcatacgtcaaagcaaccatagtacgcgccctgtagcggcgcattaagcgcggcgggtgtggtggttacgcgcagcgtgaccgctacacttgccagcgccctagcgcccgctcctttcgctttcttcccttcctttctcgccacgttcgccggctttccccgtcaagctctaaatcgggggctccctttagggttccgatttagtgctttacggcacctcgaccccaaaaaacttgatttgggtgatggttcacgtagtgggccatcgccctgatagacggtttttcgccctttgacgttggagtccacgttctttaatagtggactcttgttccaaactggaacaacactcaactctatctcgggctattcttttgatttataagggattttgccgatttcggtctattggttaaaaaatgagctgatttaacaaaaatttaacgcgaattttaacaaaatattaacgtttacaattttatggtgcactctcagtacaatctgctctgatgccgcatagttaagccagccccgacacccgccaacacccgctgacgcgccctgacgggcttgtctgctcccggcatccgcttacagacaagctgtgaccgtctccgggagctgcatgtgtcagaggttttcaccgtcatcaccgaaacgcgcgagacgaaagggcctcgtgatacgcctatttttataggttaatgtcatgataataatggtttcttagacgtcaggtggcacttttcggggaaatgtgcgcggaacccctatttgtttatttttctaaatacattcaaatatgtatccgctcatgagacaataaccctgataaatgcttcaataatattgaaaaaggaagagtatgagccatattcaacgggaaacgtcgaggccgcgattaaattccaacatggatgctgatttatatgggtataaatgggctcgcgataatgtcgggcaatcaggtgcgacaatctatcgcttgtatgggaagcccgatgcgccagagttgtttctgaaacatggcaaaggtagcgttgccaatgatgttacagatgagatggtcagactaaactggctgacggaatttatgcctcttccgaccatcaagcattttatccgtactcctgatgatgcatggttactcaccactgcgatccccggaaaaacagcattccaggtattagaagaatatcctgattcaggtgaaaatattgttgatgcgctggcagtgttcctgcgccggttgcattcgattcctgtttgtaattgtccttttaacagcgatcgcgtatttcgtctcgctcaggcgcaatcacgaatgaataacggtttggttgatgcgagtgattttgatgacgagcgtaatggctggcctgttgaacaagtctggaaagaaatgcataaacttttgccattctcaccggattcagtcgtcactcatggtgatttctcacttgataaccttatttttgacgaggggaaattaataggttgtattgatgttggacgagtcggaatcgcagaccgataccaggatcttgccatcctatggaactgcctcggtgagttttctccttcattacagaaacggctttttcaaaaatatggtattgataatcctgatatgaataaattgcagtttcatttgatgctcgatgagtttttctaagcgtataatggtctagagctagcatatggatccatcgattccattatacgcctgtcagaccaagtttactcatatatactttagattgatttaaaacttcatttttaatttaaaaggatctaggtgaagatcctttttgataatctcatgaccaaaatcccttaacgtgagttttcgttccactgagcgtcagaccccgtagaaaagatcaaaggatcttcttgagatcctttttttctgcgcgtaatctgctgcttgcaaacaaaaaaaccaccgctaccagcggtggtttgtttgccggatcaagagctaccaactctttttccgaaggtaactggcttcagcagagcgcagataccaaatactgttcttctagtgtagccgtagttaggccaccacttcaagaactctgtagcaccgcctacatacctcgctctgctaatcctgttaccagtggctgctgccagtggcgataagtcgtgtcttaccgggttggactcaagacgatagttaccggataaggcgcagcggtcgggctgaacggggggttcgtgcacacagcccagcttggagcgaacgacctacaccgaactgagatacctacagcgtgagctatgagaaagcgccacgcttcccgaagggagaaaggcggacaggtatccggtaagcggcagggtcggaacaggagagcgcacgagggagcttccagggggaaacgcctggtatctttatagtcctgtcgggtttcgccacctctgacttgagcgtcgatttttgtgatgctcgtcaggggggcggagcctatggaaaaacgccagcaacgcggcctttttacggttcctggccttttgctggccttttgctcacatgt

SEQ ID NO: 479 - DNA, 8044 bp, synthetic construct
  source 1..8044: mol_type = other DNA
tctagagctagcatatggatccatcgatttagggataacagggtaattatcagcacacaattgcccattatacgcgcgtataatggactattgtgtgctgatatctgtacacttaagggctagatcttagcttacgtcactagagggtccacgtttagtttttaagatccattgatctcctaaacgctgcaagattcgcaacctggtatacttagcctaggcgctaggtcctagtgcagcgggactttttttctaaagtcgttgagaggaggagtcgtcagaccagatagctttgatgtcctgatcggaaggatcgttggcccccctgcaggcagctgttaattaactgcgcgctcgctcgctcactgaggccgcccgggcaaagcccgggcgtcgggcgacctttggtcgcccggcctcagtgagcgagcgagcgcgcagagagggagtggccaactccatcactaggggttccttgtagttaatgattaacccgccatgctacttatctacggcgcgccacgcgttctaggagttaatttttaaaaagcagtcaaaagtccaagtgcccttgcgagcatttactctctctgtttgctctggttaataatctcaggagcacaaacattccttactagttctaggagttaatttttaaaaagcagtcaaaagtccaagtgcccttgcgagcatttactctctctgtttgctctggttaataatctcaggagcacaaacattccttactagttctagagcggccgccagtgtgctggaattcggcttttttagggctggaagctacctttgacatcatttcctctgcgaatgcatgtataatttctacagaacctattagaaaggatcacccagcctctgcttttgtacaactttcccttaaaaaactgccaatcccactgctgtttggcccaatagtgagaactttttcctgctgcctcttggtgcttttgcctatggcccctattctgcctgctgaagacactcttgccagcatggacttaaacccctccagctctgacaatcctctttctcttttgttttacatgaagggtctggcagccaaagcaatcactcaaagttcaaaccttatcattttttgctttgttcctcttggccttggttttgtacatcagctttgaaaataccatcccagggttaatgctggggttaatttataactgagagtgctctagttctgcaatacaggacatgctataaaaatggaaagatgttgctttctgagagatcaggtggattcttgggcatttgcttaagcttggtaccttttttatgggagtgagacatcctccttgttctcatagactgctggctgtgtgtgctctggtgtctctggctacagccatggagtttgggctgagctgggtctttctggtggccctgctgaagggagtccagtgtgagcagcagggagcttctagacctggacctagagatgctcaggctcatcctggaagacctagagctgtgcctacacagtgtgatgtgcctcctaattctagatttgattgtgctcctgataaggctataacacaggagcagtgtgaggctagaggatgttgttatattcctgctaagcagggactgcagggagctcagatgggacagccttggtgtttttttcctccttcttatccttcttataagctggagaatctgtcttcttctgagatgggatatacagctacactgacaagaacaacacctacattttttcctaaggatattctgacactgagactggatgtgatgatggagacagagaatagactgcattttacaattaaggatcctgctaatagaagatatgaggtgcctctagagacacctagagtgcattctagagctccttctcctctgtattctgtggagttttctgaggagccttttggagtgattgtgcatagacagctggatggaagagtgctgctgaatacaacagtggctcctctgttttttgctgatcagtttctgcagctgtctacatctctgccttctcagtatattacaggactggctgagcatctgtctcctctgatgctgtctacatcttggacaagaattacactgtggaatagagatctggctcctacacctggagctaatctgtatggatctcatcctttttatctggctctggaggatggaggatctgctcatggagtgtttctgctgaattctaatgctatggatgtagtgctgcagccttctcctgctctgtcttggagatctacaggaggaattctggatgtgtatatttttctaggacctgagcctaagtctgtggtgcagcagtatctggatgtagtgggatatccttttatgcctccttattggggactgggatttcatctgtgtagatggggatattcttctacagctattacaagacaggtggttgagaatatgacaagagctcattttcctctggatgtgcagtggaatgatctagattatatggattctagaagagattttacatttaataaggatggatttagagattttcctgctatggtgcaggagctgcatcagggaggaagaagatatatgatgattgtggatcctgctatttcttcttctggacctgctggatcttatagaccttatgatgagggactgagaagaggagtgtttattacaaatgagacaggacagcctctgattggaaaggtgtggcctggatctacagcttttcctgattttacaaatcctacagctctggcttggtgggaggatatggtggctgagtttcatgatcaggtgccttttgatggaatgtggattgatatgaatgagccttctaattttataagaggatctgaggatggatgtcctaataatgagctagagaatcctccttatgtgcctggagtagtgggaggaacactgcaggctgctacaatttgtgcttcttctcatcagtttctgtctacacattataatctgcataatctgtatggactgacagaggctattgcttctcatagagctctggtgaaggctagaggaacaagaccttttgtgatttctagatctacatttgctggacatggaagatatgctggacattggacaggagatgtatggtcttcttgggagcagctagcttcttctgtgcctgagattctgcagtttaatctgctaggagtgcctctggtgggagctgatgtgtgtggatttctgggaaatacatctgaggagctgtgtgtgagatggacacagctgggagctttttatccttttatgagaaatcataattctctgctgtctctgcctcaggagccttattctttttctgagcctgctcagcaggctatgagaaaggctctgacactgagatatgctctgctgcctcatctgtatacactgtttcatcaggctcatgtggctggagagacagtagctagacctctgtttctggagtttcctaaggattcttctacatggacagttgatcatcagctgctgtggggagaggctctgctgattacacctgtgctgcaggctggaaaggctgaggtgacaggatattttcctctgggaacatggtatgatctgcagacagtgcctatagaggctctgggatctctgcctcctcctcctgctgctcctagagagcctgctattcattctgagggacagtgggtgacactgcctgctcctctggatacaattaatgtgcatctgagagctggatatattattcctctgcagggacctggactgacaacaacagagtctagacagcagcctatggctctggctgtggctctgacaaagggaggagaggctagaggagagctgttttgggatgatggagagtctctggaggtgctggagagaggagcttatacacaggtgatttttctggctagaaataatacaattgtgaatgagctggtgagagtgacatctgagggagctggactgcagctgcagaaggtgacagtgctgggagtggctacagctcctcagcaggtgctgtctaatggagtgcctgtgtctaattttacatattctcctgatacaaaggtgctggatatttgtgtgtctctgctgatgggagagcagtttctggtgtcttggtgttaatgatttaaatctcgagccgggcggagtgtgttagtctctccagagggaggctggttccccagggaagcagagcctgtgtgcgggcagcagctgtgtgcgggcctgggggttgttaagtgcaattatttttaataaaaggggcatttggaaaaaaaaaaaaaaggtagcagtcgacagatgaattctgcagatctgtggcttctagctgcccgggtggcatccctgtgacccctccccagtgcctctcctggccctggaagttgccactccagtgcccaccagccttgtcctaataaaattaagttgcatcattttgtctgactaggtgtccttctataatattatggggtggaggggggtggtatggagcaaggggcaagttgggaagacaacctgtagggcctgcggggtctattgggaaccaagctggagtgcagtggcacaatcttggctcactgcaatctccgcctcctgggttcaagcgattctcctgcctcagcctcccgagttgttgggattccaggcatgcatgaccaggctcagctaatttttgtttttttggtagagacggggtttcaccatattggccaggctggtctccaactcctaatctcaggtgatctacccaccttggcctcccaaattgctgggattacaggcgtgaaccactgctcccttccctgtccttctgattttaaaaaaaagagaaatgttctggcacctgcacttgcactggggacagcctattttgctagtttgttttgtttcgttttgttttgatggagagcgtatgttgtttaaacgcggccgcgtagataagtagcatggcgggttaatcattaactacaaggaacccctagtgatggagttggccactccctctctgcgcgctcgctcgctcactgaggccgggcgaccaaaggtcgcccgacgcccgggctttgcccgggcggcctcagtgagcgagcgagcgcgcagttaattaaggcgccctaggccgacccttagactctgtactcagttctataaacgagccattggatacgagatccgtagattgataagggacacggaatatccccggacgcaatagacaccggtggacagcttggtatcctgagcacagtcgcgcgtccgaatctagctctactttagaggccccggattctgatggtcgtagaccgcagaaccgattggggggatgagatctactagttatcagcacacaattgcccattatacgcgcgtataatggactattgtgtgctgatatagggataacagggtaattctagagctagcatatggatccatcgatttgatgcggtattttctccttacgcatctgtgcggtatttcacaccgcatacgtcaaagcaaccatagtacgcgccctgtagcggcgcattaagcgcggcgggtgtggtggttacgcgcagcgtgaccgctacacttgccagcgccctagcgcccgctcctttcgctttcttcccttcctttctcgccacgttcgccggctttccccgtcaagctctaaatcgggggctccctttagggttccgatttagtgctttacggcacctcgaccccaaaaaacttgatttgggtgatggttcacgtagtgggccatcgccctgatagacggtttttcgccctttgacgttggagtccacgttctttaatagtggactcttgttccaaactggaacaacactcaactctatctcgggctattcttttgatttataagggattttgccgatttcggtctattggttaaaaaatgagctgatttaacaaaaatttaacgcgaattttaacaaaatattaacgtttacaattttatggtgcactctcagtacaatctgctctgatgccgcatagttaagccagccccgacacccgccaacacccgctgacgcgccctgacgggcttgtctgctcccggcatccgcttacagacaagctgtgaccgtctccgggagctgcatgtgtcagaggttttcaccgtcatcaccgaaacgcgcgagacgaaagggcctcgtgatacgcctatttttataggttaatgtcatgataataatggtttcttagacgtcaggtggcacttttcggggaaatgtgcgcggaacccctatttgtttatttttctaaatacattcaaatatgtatccgctcatgagacaataaccctgataaatgcttcaataatattgaaaaaggaagagtatgagccatattcaacgggaaacgtcgaggccgcgattaaattccaacatggatgctgatttatatgggtataaatgggctcgcgataatgtcgggcaatcaggtgcgacaatctatcgcttgtatgggaagcccgatgcgccagagttgtttctgaaacatggcaaaggtagcgttgccaatgatgttacagatgagatggtcagactaaactggctgacggaatttatgcctcttccgaccatcaagcattttatccgtactcctgatgatgcatggttactcaccactgcgatccccggaaaaacagcattccaggtattagaagaatatcctgattcaggtgaaaatattgttgatgcgctggcagtgttcctgcgccggttgcattcgattcctgtttgtaattgtccttttaacagcgatcgcgtatttcgtctcgctcaggcgcaatcacgaatgaataacggtttggttgatgcgagtgattttgatgacgagcgtaatggctggcctgttgaacaagtctggaaagaaatgcataaacttttgccattctcaccggattcagtcgtcactcatggtgatttctcacttgataaccttatttttgacgaggggaaattaataggttgtattgatgttggacgagtcggaatcgcagaccgataccaggatcttgccatcctatggaactgcctcggtgagttttctccttcattacagaaacggctttttcaaaaatatggtattgataatcctgatatgaataaattgcagtttcatttgatgctcgatgagtttttctaagcgtataatggtctagagctagcatatggatccatcgattccattatacgcctgtcagaccaagtttactcatatatactttagattgatttaaaacttcatttttaatttaaaaggatctaggtgaagatcctttttgataatctcatgaccaaaatcccttaacgtgagttttcgttccactgagcgtcagaccccgtagaaaagatcaaaggatcttcttgagatcctttttttctgcgcgtaatctgctgcttgcaaacaaaaaaaccaccgctaccagcggtggtttgtttgccggatcaagagctaccaactctttttccgaaggtaactggcttcagcagagcgcagataccaaatactgttcttctagtgtagccgtagttaggccaccacttcaagaactctgtagcaccgcctacatacctcgctctgctaatcctgttaccagtggctgctgccagtggcgataagtcgtgtcttaccgggttggactcaagacgatagttaccggataaggcgcagcggtcgggctgaacggggggttcgtgcacacagcccagcttggagcgaacgacctacaccgaactgagatacctacagcgtgagctatgagaaagcgccacgcttcccgaagggagaaaggcggacaggtatccggtaagcggcagggtcggaacaggagagcgcacgagggagcttccagggggaaacgcctggtatctttatagtcctgtcgggtttcgccacctctgacttgagcgtcgatttttgtgatgctcgtcaggggggcggagcctatggaaaaacgccagcaacgcggcctttttacggttcctggccttttgctggccttttgctcacatgt

SEQ ID NO: 480 - DNA, 8038 bp, synthetic construct
  source 1..8038: mol_type = other DNA
tctagagctagcatatggatccatcgatttagggataacagggtaattatcagcacacaattgcccattatacgcgcgtataatggactattgtgtgctgatatctgtacacttaagggctagatcttagcttacgtcactagagggtccacgtttagtttttaagatccattgatctcctaaacgctgcaagattcgcaacctggtatacttagcctaggcgctaggtcctagtgcagcgggactttttttctaaagtcgttgagaggaggagtcgtcagaccagatagctttgatgtcctgatcggaaggatcgttggcccccctgcaggcagctgttaattaactgcgcgctcgctcgctcactgaggccgcccgggcaaagcccgggcgtcgggcgacctttggtcgcccggcctcagtgagcgagcgagcgcgcagagagggagtggccaactccatcactaggggttccttgtagttaatgattaacccgccatgctacttatctacggcgcgccacgcgttctaggagttaatttttaaaaagcagtcaaaagtccaagtgcccttgcgagcatttactctctctgtttgctctggttaataatctcaggagcacaaacattccttactagttctaggagttaatttttaaaaagcagtcaaaagtccaagtgcccttgcgagcatttactctctctgtttgctctggttaataatctcaggagcacaaacattccttactagttctagagcggccgccagtgtgctggaattcggcttttttagggctggaagctacctttgacatcatttcctctgcgaatgcatgtataatttctacagaacctattagaaaggatcacccagcctctgcttttgtacaactttcccttaaaaaactgccaatcccactgctgtttggcccaatagtgagaactttttcctgctgcctcttggtgcttttgcctatggcccctattctgcctgctgaagacactcttgccagcatggacttaaacccctccagctctgacaatcctctttctcttttgttttacatgaagggtctggcagccaaagcaatcactcaaagttcaaaccttatcattttttgctttgttcctcttggccttggttttgtacatcagctttgaaaataccatcccagggttaatgctggggttaatttataactgagagtgctctagttctgcaatacaggacatgctataaaaatggaaagatgttgctttctgagagatcaggtggattcttgggcatttgcttaagcttggtaccttttttatgggggtgaggcaccctccctgttctcacaggctgctggctgtgtgtgctctggtgtctctggccaccatgtacagaatgcagctgctgtcctgcattgcactgtcactggcactggttaccaactcacagcagggggccagcaggccaggccccagggatgcccaggcccaccctggcagacccagggctgtgcccacccagtgtgatgtgcctcccaacagcagatttgactgtgcccctgataaggccattactcaggaacagtgtgaggccaggggctgctgctatatccctgccaagcagggcctgcagggggcccagatggggcagccctggtgcttcttcccccccagctacccctcttataagctggagaatctgagcagctctgaaatgggctacactgccactctgaccaggactacccccaccttcttccccaaggatattctgactctgaggctggatgtgatgatggagactgagaacaggctgcacttcaccatcaaggaccctgccaacaggaggtatgaggtgcccctggaaactcccagggtgcactctagggcccccagccccctgtattctgtggagttctctgaggagccttttggggtcattgtccacaggcagctggatggcagggtgctgctgaatactactgtggcccctctgttctttgctgaccagttcctgcagctgagcaccagcctgccttctcagtacattactggcctggctgagcatctgagccccctgatgctgagcacctcttggaccagaatcaccctgtggaacagggacctggctcccactcctggggccaacctgtatggcagccaccccttctacctggccctggaggatgggggctctgcccatggggtgttcctgctgaacagcaatgccatggatgtggtgctgcagccctctcctgccctgtcttggagatctactgggggcatcctggatgtgtatatcttcctggggcctgagcccaagtctgtggtgcagcagtacctggatgtggtgggctaccccttcatgcccccctactggggcctgggcttccacctgtgcaggtggggctactcttctactgctatcaccaggcaggtggtggagaacatgaccagggctcacttccctctggatgtgcagtggaatgacctggactacatggactctaggagagacttcacttttaataaggatgggttcagggactttcctgccatggtgcaggagctgcatcaggggggcaggagatatatgatgattgtggaccctgctatttctagctctggccctgctggcagctataggccctatgatgaggggctgaggaggggggtgttcatcactaatgagactggccagcccctgattggcaaggtgtggcctggctctactgccttccctgatttcaccaaccccactgccctggcctggtgggaggatatggtggctgagtttcatgaccaggtgccctttgatggcatgtggattgacatgaatgagcccagcaactttatcaggggctctgaagatggctgccccaacaatgagctggagaaccccccctatgtgcctggggtggtggggggcaccctgcaggctgccaccatctgtgccagcagccaccagttcctgagcacccactataacctgcacaacctgtatggcctgactgaggccattgcctctcacagggccctggtgaaggctagggggactaggccctttgtgatcagcaggtctacttttgctggccatggcaggtatgctgggcactggactggggatgtgtggtctagctgggagcagctggccagctctgtgcctgagatcctgcagtttaatctgctgggggtgcccctggtgggggctgatgtgtgtggcttcctgggcaatacctctgaggagctgtgtgtgaggtggactcagctgggggctttctaccccttcatgagaaaccacaactctctgctgagcctgccccaggagccctattctttttctgagcctgcccagcaggctatgaggaaggccctgactctgaggtatgccctgctgccccacctgtataccctgttccatcaggcccatgtggctggggagactgtggccagacctctgttcctggagttccccaaggatagctctacttggactgtggaccaccagctgctgtggggggaggctctgctgatcacccctgtgctgcaggctgggaaggctgaggtgactggctatttccccctgggcacctggtatgatctgcagactgtgcccattgaggccctgggctctctgccccctccccctgctgcccccagggagcctgccatccactctgagggccagtgggtgaccctgcctgcccctctggacactatcaatgtgcacctgagggctggctacatcatccccctgcagggccctggcctgactaccactgagtctaggcagcagcccatggccctggctgtggctctgaccaaggggggggaggccaggggggagctgttctgggatgatggggagtctctggaggtgctggagaggggggcctacacccaggtgatcttcctggctaggaataacaccattgtcaatgagctggtgagggtgacctctgagggggctggcctgcagctgcagaaggtgactgtgctgggggtggctactgccccccagcaggtgctgagcaatggggtgcctgtgagcaacttcacctatagccctgacaccaaggtgctggacatctgtgtgagcctgctgatgggggagcagttcctggtgagctggtgctaatttaaatctcgagccgggcggagtgtgttagtctctccagagggaggctggttccccagggaagcagagcctgtgtgcgggcagcagctgtgtgcgggcctgggggttgttaagtgcaattatttttaataaaaggggcatttggaaaaaaaaaaaaaaggtagcagtcgacagatgaattctgcagatctgtggcttctagctgcccgggtggcatccctgtgacccctccccagtgcctctcctggccctggaagttgccactccagtgcccaccagccttgtcctaataaaattaagttgcatcattttgtctgactaggtgtccttctataatattatggggtggaggggggtggtatggagcaaggggcaagttgggaagacaacctgtagggcctgcggggtctattgggaaccaagctggagtgcagtggcacaatcttggctcactgcaatctccgcctcctgggttcaagcgattctcctgcctcagcctcccgagttgttgggattccaggcatgcatgaccaggctcagctaatttttgtttttttggtagagacggggtttcaccatattggccaggctggtctccaactcctaatctcaggtgatctacccaccttggcctcccaaattgctgggattacaggcgtgaaccactgctcccttccctgtccttctgattttaaaaaaaagagaaatgttctggcacctgcacttgcactggggacagcctattttgctagtttgttttgtttcgttttgttttgatggagagcgtatgttgtttaaacgcggccgcgtagataagtagcatggcgggttaatcattaactacaaggaacccctagtgatggagttggccactccctctctgcgcgctcgctcgctcactgaggccgggcgaccaaaggtcgcccgacgcccgggctttgcccgggcggcctcagtgagcgagcgagcgcgcagttaattaaggcgccctaggccgacccttagactctgtactcagttctataaacgagccattggatacgagatccgtagattgataagggacacggaatatccccggacgcaatagacaccggtggacagcttggtatcctgagcacagtcgcgcgtccgaatctagctctactttagaggccccggattctgatggtcgtagaccgcagaaccgattggggggatgagatctactagttatcagcacacaattgcccattatacgcgcgtataatggactattgtgtgctgatatagggataacagggtaattctagagctagcatatggatccatcgatttgatgcggtattttctccttacgcatctgtgcggtatttcacaccgcatacgtcaaagcaaccatagtacgcgccctgtagcggcgcattaagcgcggcgggtgtggtggttacgcgcagcgtgaccgctacacttgccagcgccctagcgcccgctcctttcgctttcttcccttcctttctcgccacgttcgccggctttccccgtcaagctctaaatcgggggctccctttagggttccgatttagtgctttacggcacctcgaccccaaaaaacttgatttgggtgatggttcacgtagtgggccatcgccctgatagacggtttttcgccctttgacgttggagtccacgttctttaatagtggactcttgttccaaactggaacaacactcaactctatctcgggctattcttttgatttataagggattttgccgatttcggtctattggttaaaaaatgagctgatttaacaaaaatttaacgcgaattttaacaaaatattaacgtttacaattttatggtgcactctcagtacaatctgctctgatgccgcatagttaagccagccccgacacccgccaacacccgctgacgcgccctgacgggcttgtctgctcccggcatccgcttacagacaagctgtgaccgtctccgggagctgcatgtgtcagaggttttcaccgtcatcaccgaaacgcgcgagacgaaagggcctcgtgatacgcctatttttataggttaatgtcatgataataatggtttcttagacgtcaggtggcacttttcggggaaatgtgcgcggaacccctatttgtttatttttctaaatacattcaaatatgtatccgctcatgagacaataaccctgataaatgcttcaataatattgaaaaaggaagagtatgagccatattcaacgggaaacgtcgaggccgcgattaaattccaacatggatgctgatttatatgggtataaatgggctcgcgataatgtcgggcaatcaggtgcgacaatctatcgcttgtatgggaagcccgatgcgccagagttgtttctgaaacatggcaaaggtagcgttgccaatgatgttacagatgagatggtcagactaaactggctgacggaatttatgcctcttccgaccatcaagcattttatccgtactcctgatgatgcatggttactcaccactgcgatccccggaaaaacagcattccaggtattagaagaatatcctgattcaggtgaaaatattgttgatgcgctggcagtgttcctgcgccggttgcattcgattcctgtttgtaattgtccttttaacagcgatcgcgtatttcgtctcgctcaggcgcaatcacgaatgaataacggtttggttgatgcgagtgattttgatgacgagcgtaatggctggcctgttgaacaagtctggaaagaaatgcataaacttttgccattctcaccggattcagtcgtcactcatggtgatttctcacttgataaccttatttttgacgaggggaaattaataggttgtattgatgttggacgagtcggaatcgcagaccgataccaggatcttgccatcctatggaactgcctcggtgagttttctccttcattacagaaacggctttttcaaaaatatggtattgataatcctgatatgaataaattgcagtttcatttgatgctcgatgagtttttctaagcgtataatggtctagagctagcatatggatccatcgattccattatacgcctgtcagaccaagtttactcatatatactttagattgatttaaaacttcatttttaatttaaaaggatctaggtgaagatcctttttgataatctcatgaccaaaatcccttaacgtgagttttcgttccactgagcgtcagaccccgtagaaaagatcaaaggatcttcttgagatcctttttttctgcgcgtaatctgctgcttgcaaacaaaaaaaccaccgctaccagcggtggtttgtttgccggatcaagagctaccaactctttttccgaaggtaactggcttcagcagagcgcagataccaaatactgttcttctagtgtagccgtagttaggccaccacttcaagaactctgtagcaccgcctacatacctcgctctgctaatcctgttaccagtggctgctgccagtggcgataagtcgtgtcttaccgggttggactcaagacgatagttaccggataaggcgcagcggtcgggctgaacggggggttcgtgcacacagcccagcttggagcgaacgacctacaccgaactgagatacctacagcgtgagctatgagaaagcgccacgcttcccgaagggagaaaggcggacaggtatccggtaagcggcagggtcggaacaggagagcgcacgagggagcttccagggggaaacgcctggtatctttatagtcctgtcgggtttcgccacctctgacttgagcgtcgatttttgtgatgctcgtcaggggggcggagcctatggaaaaacgccagcaacgcggcctttttacggttcctggccttttgctggccttttgctcacatgt

SEQ ID NO: 481 - DNA, 8038 bp, synthetic construct
  source 1..8038: mol_type = other DNA
tctagagctagcatatggatccatcgatttagggataacagggtaattatcagcacacaattgcccattatacgcgcgtataatggactattgtgtgctgatatctgtacacttaagggctagatcttagcttacgtcactagagggtccacgtttagtttttaagatccattgatctcctaaacgctgcaagattcgcaacctggtatacttagcctaggcgctaggtcctagtgcagcgggactttttttctaaagtcgttgagaggaggagtcgtcagaccagatagctttgatgtcctgatcggaaggatcgttggcccccctgcaggcagctgttaattaactgcgcgctcgctcgctcactgaggccgcccgggcaaagcccgggcgtcgggcgacctttggtcgcccggcctcagtgagcgagcgagcgcgcagagagggagtggccaactccatcactaggggttccttgtagttaatgattaacccgccatgctacttatctacggcgcgccacgcgttctaggagttaatttttaaaaagcagtcaaaagtccaagtgcccttgcgagcatttactctctctgtttgctctggttaataatctcaggagcacaaacattccttactagttctaggagttaatttttaaaaagcagtcaaaagtccaagtgcccttgcgagcatttactctctctgtttgctctggttaataatctcaggagcacaaacattccttactagttctagagcggccgccagtgtgctggaattcggcttttttagggctggaagctacctttgacatcatttcctctgcgaatgcatgtataatttctacagaacctattagaaaggatcacccagcctctgcttttgtacaactttcccttaaaaaactgccaatcccactgctgtttggcccaatagtgagaactttttcctgctgcctcttggtgcttttgcctatggcccctattctgcctgctgaagacactcttgccagcatggacttaaacccctccagctctgacaatcctctttctcttttgttttacatgaagggtctggcagccaaagcaatcactcaaagttcaaaccttatcattttttgctttgttcctcttggccttggttttgtacatcagctttgaaaataccatcccagggttaatgctggggttaatttataactgagagtgctctagttctgcaatacaggacatgctataaaaatggaaagatgttgctttctgagagatcaggtggattcttgggcatttgcttaagcttggtaccttttttatgggggtgaggcaccctccctgttctcacaggctgctggctgtgtgtgctctggtgtctctggccaccatggagtttgggctgagctgggtctttctggtggccctgctgaagggagtccagtgtgagcagcagggggccagcaggccaggccccagggatgcccaggcccaccctggcagacccagggctgtgcccacccagtgtgatgtgcctcccaacagcagatttgactgtgcccctgataaggccattactcaggaacagtgtgaggccaggggctgctgctatatccctgccaagcagggcctgcagggggcccagatggggcagccctggtgcttcttcccccccagctacccctcttataagctggagaatctgagcagctctgaaatgggctacactgccactctgaccaggactacccccaccttcttccccaaggatattctgactctgaggctggatgtgatgatggagactgagaacaggctgcacttcaccatcaaggaccctgccaacaggaggtatgaggtgcccctggaaactcccagggtgcactctagggcccccagccccctgtattctgtggagttctctgaggagccttttggggtcattgtccacaggcagctggatggcagggtgctgctgaatactactgtggcccctctgttctttgctgaccagttcctgcagctgagcaccagcctgccttctcagtacattactggcctggctgagcatctgagccccctgatgctgagcacctcttggaccagaatcaccctgtggaacagggacctggctcccactcctggggccaacctgtatggcagccaccccttctacctggccctggaggatgggggctctgcccatggggtgttcctgctgaacagcaatgccatggatgtggtgctgcagccctctcctgccctgtcttggagatctactgggggcatcctggatgtgtatatcttcctggggcctgagcccaagtctgtggtgcagcagtacctggatgtggtgggctaccccttcatgcccccctactggggcctgggcttccacctgtgcaggtggggctactcttctactgctatcaccaggcaggtggtggagaacatgaccagggctcacttccctctggatgtgcagtggaatgacctggactacatggactctaggagagacttcacttttaataaggatgggttcagggactttcctgccatggtgcaggagctgcatcaggggggcaggagatatatgatgattgtggaccctgctatttctagctctggccctgctggcagctataggccctatgatgaggggctgaggaggggggtgttcatcactaatgagactggccagcccctgattggcaaggtgtggcctggctctactgccttccctgatttcaccaaccccactgccctggcctggtgggaggatatggtggctgagtttcatgaccaggtgccctttgatggcatgtggattgacatgaatgagcccagcaactttatcaggggctctgaagatggctgccccaacaatgagctggagaaccccccctatgtgcctggggtggtggggggcaccctgcaggctgccaccatctgtgccagcagccaccagttcctgagcacccactataacctgcacaacctgtatggcctgactgaggccattgcctctcacagggccctggtgaaggctagggggactaggccctttgtgatcagcaggtctacttttgctggccatggcaggtatgctgggcactggactggggatgtgtggtctagctgggagcagctggccagctctgtgcctgagatcctgcagtttaatctgctgggggtgcccctggtgggggctgatgtgtgtggcttcctgggcaatacctctgaggagctgtgtgtgaggtggactcagctgggggctttctaccccttcatgagaaaccacaactctctgctgagcctgccccaggagccctattctttttctgagcctgcccagcaggctatgaggaaggccctgactctgaggtatgccctgctgccccacctgtataccctgttccatcaggcccatgtggctggggagactgtggccagacctctgttcctggagttccccaaggatagctctacttggactgtggaccaccagctgctgtggggggaggctctgctgatcacccctgtgctgcaggctgggaaggctgaggtgactggctatttccccctgggcacctggtatgatctgcagactgtgcccattgaggccctgggctctctgccccctccccctgctgcccccagggagcctgccatccactctgagggccagtgggtgaccctgcctgcccctctggacactatcaatgtgcacctgagggctggctacatcatccccctgcagggccctggcctgactaccactgagtctaggcagcagcccatggccctggctgtggctctgaccaaggggggggaggccaggggggagctgttctgggatgatggggagtctctggaggtgctggagaggggggcctacacccaggtgatcttcctggctaggaataacaccattgtcaatgagctggtgagggtgacctctgagggggctggcctgcagctgcagaaggtgactgtgctgggggtggctactgccccccagcaggtgctgagcaatggggtgcctgtgagcaacttcacctatagccctgacaccaaggtgctggacatctgtgtgagcctgctgatgggggagcagttcctggtgagctggtgctaatttaaatctcgagccgggcggagtgtgttagtctctccagagggaggctggttccccagggaagcagagcctgtgtgcgggcagcagctgtgtgcgggcctgggggttgttaagtgcaattatttttaataaaaggggcatttggaaaaaaaaaaaaaaggtagcagtcgacagatgaattctgcagatctgtggcttctagctgcccgggtggcatccctgtgacccctccccagtgcctctcctggccctggaagttgccactccagtgcccaccagccttgtcctaataaaattaagttgcatcattttgtctgactaggtgtccttctataatattatggggtggaggggggtggtatggagcaaggggcaagttgggaagacaacctgtagggcctgcggggtctattgggaaccaagctggagtgcagtggcacaatcttggctcactgcaatctccgcctcctgggttcaagcgattctcctgcctcagcctcccgagttgttgggattccaggcatgcatgaccaggctcagctaatttttgtttttttggtagagacggggtttcaccatattggccaggctggtctccaactcctaatctcaggtgatctacccaccttggcctcccaaattgctgggattacaggcgtgaaccactgctcccttccctgtccttctgattttaaaaaaaagagaaatgttctggcacctgcacttgcactggggacagcctattttgctagtttgttttgtttcgttttgttttgatggagagcgtatgttgtttaaacgcggccgcgtagataagtagcatggcgggttaatcattaactacaaggaacccctagtgatggagttggccactccctctctgcgcgctcgctcgctcactgaggccgggcgaccaaaggtcgcccgacgcccgggctttgcccgggcggcctcagtgagcgagcgagcgcgcagttaattaaggcgccctaggccgacccttagactctgtactcagttctataaacgagccattggatacgagatccgtagattgataagggacacggaatatccccggacgcaatagacaccggtggacagcttggtatcctgagcacagtcgcgcgtccgaatctagctctactttagaggccccggattctgatggtcgtagaccgcagaaccgattggggggatgagatctactagttatcagcacacaattgcccattatacgcgcgtataatggactattgtgtgctgatatagggataacagggtaattctagagctagcatatggatccatcgatttgatgcggtattttctccttacgcatctgtgcggtatttcacaccgcatacgtcaaagcaaccatagtacgcgccctgtagcggcgcattaagcgcggcgggtgtggtggttacgcgcagcgtgaccgctacacttgccagcgccctagcgcccgctcctttcgctttcttcccttcctttctcgccacgttcgccggctttccccgtcaagctctaaatcgggggctccctttagggttccgatttagtgctttacggcacctcgaccccaaaaaacttgatttgggtgatggttcacgtagtgggccatcgccctgatagacggtttttcgccctttgacgttggagtccacgttctttaatagtggactcttgttccaaactggaacaacactcaactctatctcgggctattcttttgatttataagggattttgccgatttcggtctattggttaaaaaatgagctgatttaacaaaaatttaacgcgaattttaacaaaatattaacgtttacaattttatggtgcactctcagtacaatctgctctgatgccgcatagttaagccagccccgacacccgccaacacccgctgacgcgccctgacgggcttgtctgctcccggcatccgcttacagacaagctgtgaccgtctccgggagctgcatgtgtcagaggttttcaccgtcatcaccgaaacgcgcgagacgaaagggcctcgtgatacgcctatttttataggttaatgtcatgataataatggtttcttagacgtcaggtggcacttttcggggaaatgtgcgcggaacccctatttgtttatttttctaaatacattcaaatatgtatccgctcatgagacaataaccctgataaatgcttcaataatattgaaaaaggaagagtatgagccatattcaacgggaaacgtcgaggccgcgattaaattccaacatggatgctgatttatatgggtataaatgggctcgcgataatgtcgggcaatcaggtgcgacaatctatcgcttgtatgggaagcccgatgcgccagagttgtttctgaaacatggcaaaggtagcgttgccaatgatgttacagatgagatggtcagactaaactggctgacggaatttatgcctcttccgaccatcaagcattttatccgtactcctgatgatgcatggttactcaccactgcgatccccggaaaaacagcattccaggtattagaagaatatcctgattcaggtgaaaatattgttgatgcgctggcagtgttcctgcgccggttgcattcgattcctgtttgtaattgtccttttaacagcgatcgcgtatttcgtctcgctcaggcgcaatcacgaatgaataacggtttggttgatgcgagtgattttgatgacgagcgtaatggctggcctgttgaacaagtctggaaagaaatgcataaacttttgccattctcaccggattcagtcgtcactcatggtgatttctcacttgataaccttatttttgacgaggggaaattaataggttgtattgatgttggacgagtcggaatcgcagaccgataccaggatcttgccatcctatggaactgcctcggtgagttttctccttcattacagaaacggctttttcaaaaatatggtattgataatcctgatatgaataaattgcagtttcatttgatgctcgatgagtttttctaagcgtataatggtctagagctagcatatggatccatcgattccattatacgcctgtcagaccaagtttactcatatatactttagattgatttaaaacttcatttttaatttaaaaggatctaggtgaagatcctttttgataatctcatgaccaaaatcccttaacgtgagttttcgttccactgagcgtcagaccccgtagaaaagatcaaaggatcttcttgagatcctttttttctgcgcgtaatctgctgcttgcaaacaaaaaaaccaccgctaccagcggtggtttgtttgccggatcaagagctaccaactctttttccgaaggtaactggcttcagcagagcgcagataccaaatactgttcttctagtgtagccgtagttaggccaccacttcaagaactctgtagcaccgcctacatacctcgctctgctaatcctgttaccagtggctgctgccagtggcgataagtcgtgtcttaccgggttggactcaagacgatagttaccggataaggcgcagcggtcgggctgaacggggggttcgtgcacacagcccagcttggagcgaacgacctacaccgaactgagatacctacagcgtgagctatgagaaagcgccacgcttcccgaagggagaaaggcggacaggtatccggtaagcggcagggtcggaacaggagagcgcacgagggagcttccagggggaaacgcctggtatctttatagtcctgtcgggtttcgccacctctgacttgagcgtcgatttttgtgatgctcgtcaggggggcggagcctatggaaaaacgccagcaacgcggcctttttacggttcctggccttttgctggccttttgctcacatgt

SEQ ID NO: 482 - DNA, 8041 bp, synthetic construct
  source 1..8041: mol_type = other DNA
tctagagctagcatatggatccatcgatttagggataacagggtaattatcagcacacaattgcccattatacgcgcgtataatggactattgtgtgctgatatctgtacacttaagggctagatcttagcttacgtcactagagggtccacgtttagtttttaagatccattgatctcctaaacgctgcaagattcgcaacctggtatacttagcctaggcgctaggtcctagtgcagcgggactttttttctaaagtcgttgagaggaggagtcgtcagaccagatagctttgatgtcctgatcggaaggatcgttggcccccctgcaggcagctgttaattaactgcgcgctcgctcgctcactgaggccgcccgggcaaagcccgggcgtcgggcgacctttggtcgcccggcctcagtgagcgagcgagcgcgcagagagggagtggccaactccatcactaggggttccttgtagttaatgattaacccgccatgctacttatctacggcgcgccacgcgttctaggagttaatttttaaaaagcagtcaaaagtccaagtgcccttgcgagcatttactctctctgtttgctctggttaataatctcaggagcacaaacattccttactagttctaggagttaatttttaaaaagcagtcaaaagtccaagtgcccttgcgagcatttactctctctgtttgctctggttaataatctcaggagcacaaacattccttactagttctagagcggccgccagtgtgctggaattcggcttttttagggctggaagctacctttgacatcatttcctctgcgaatgcatgtataatttctacagaacctattagaaaggatcacccagcctctgcttttgtacaactttcccttaaaaaactgccaatcccactgctgtttggcccaatagtgagaactttttcctgctgcctcttggtgcttttgcctatggcccctattctgcctgctgaagacactcttgccagcatggacttaaacccctccagctctgacaatcctctttctcttttgttttacatgaagggtctggcagccaaagcaatcactcaaagttcaaaccttatcattttttgctttgttcctcttggccttggttttgtacatcagctttgaaaataccatcccagggttaatgctggggttaatttataactgagagtgctctagttctgcaatacaggacatgctataaaaatggaaagatgttgctttctgagagatcaggtggattcttgggcatttgcttaagcttggtaccttttttatgggagtgagacatcctccttgttctcatagactgctggctgtgtgtgctctggtgtctctggccaccatgtacagaatgcagctgctgtcctgcattgcactgtcactggcactggttaccaactcacagcagggagcttctagacctggacctagagatgctcaggctcatcctggaagacctagagctgtgcctacacagtgtgatgtgcctcctaattctagatttgattgtgctcctgataaggctataacacaggagcagtgtgaggctagaggatgttgttatattcctgctaagcagggactgcagggagctcagatgggacagccttggtgtttttttcctccttcttatccttcttataagctggagaatctgtcttcttctgagatgggatatacagctacactgacaagaacaacacctacattttttcctaaggatattctgacactgagactggatgtgatgatggagacagagaatagactgcattttacaattaaggatcctgctaatagaagatatgaggtgcctctagagacacctagagtgcattctagagctccttctcctctgtattctgtggagttttctgaggagccttttggagtgattgtgcatagacagctggatggaagagtgctgctgaatacaacagtggctcctctgttttttgctgatcagtttctgcagctgtctacatctctgccttctcagtatattacaggactggctgagcatctgtctcctctgatgctgtctacatcttggacaagaattacactgtggaatagagatctggctcctacacctggagctaatctgtatggatctcatcctttttatctggctctggaggatggaggatctgctcatggagtgtttctgctgaattctaatgctatggatgtagtgctgcagccttctcctgctctgtcttggagatctacaggaggaattctggatgtgtatatttttctaggacctgagcctaagtctgtggtgcagcagtatctggatgtagtgggatatccttttatgcctccttattggggactgggatttcatctgtgtagatggggatattcttctacagctattacaagacaggtggttgagaatatgacaagagctcattttcctctggatgtgcagtggaatgatctagattatatggattctagaagagattttacatttaataaggatggatttagagattttcctgctatggtgcaggagctgcatcagggaggaagaagatatatgatgattgtggatcctgctatttcttcttctggacctgctggatcttatagaccttatgatgagggactgagaagaggagtgtttattacaaatgagacaggacagcctctgattggaaaggtgtggcctggatctacagcttttcctgattttacaaatcctacagctctggcttggtgggaggatatggtggctgagtttcatgatcaggtgccttttgatggaatgtggattgatatgaatgagccttctaattttataagaggatctgaggatggatgtcctaataatgagctagagaatcctccttatgtgcctggagtagtgggaggaacactgcaggctgctacaatttgtgcttcttctcatcagtttctgtctacacattataatctgcataatctgtatggactgacagaggctattgcttctcatagagctctggtgaaggctagaggaacaagaccttttgtgatttctagatctacatttgctggacatggaagatatgctggacattggacaggagatgtatggtcttcttgggagcagctagcttcttctgtgcctgagattctgcagtttaatctgctaggagtgcctctggtgggagctgatgtgtgtggatttctgggaaatacatctgaggagctgtgtgtgagatggacacagctgggagctttttatccttttatgagaaatcataattctctgctgtctctgcctcaggagccttattctttttctgagcctgctcagcaggctatgagaaaggctctgacactgagatatgctctgctgcctcatctgtatacactgtttcatcaggctcatgtggctggagagacagtagctagacctctgtttctggagtttcctaaggattcttctacatggacagttgatcatcagctgctgtggggagaggctctgctgattacacctgtgctgcaggctggaaaggctgaggtgacaggatattttcctctgggaacatggtatgatctgcagacagtgcctatagaggctctgggatctctgcctcctcctcctgctgctcctagagagcctgctattcattctgagggacagtgggtgacactgcctgctcctctggatacaattaatgtgcatctgagagctggatatattattcctctgcagggacctggactgacaacaacagagtctagacagcagcctatggctctggctgtggctctgacaaagggaggagaggctagaggagagctgttttgggatgatggagagtctctggaggtgctggagagaggagcttatacacaggtgatttttctggctagaaataatacaattgtgaatgagctggtgagagtgacatctgagggagctggactgcagctgcagaaggtgacagtgctgggagtggctacagctcctcagcaggtgctgtctaatggagtgcctgtgtctaattttacatattctcctgatacaaaggtgctggatatttgtgtgtctctgctgatgggagagcagtttctggtgtcttggtgttaatgatttaaatctcgagccgggcggagtgtgttagtctctccagagggaggctggttccccagggaagcagagcctgtgtgcgggcagcagctgtgtgcgggcctgggggttgttaagtgcaattatttttaataaaaggggcatttggaaaaaaaaaaaaaaggtagcagtcgacagatgaattctgcagatctgtggcttctagctgcccgggtggcatccctgtgacccctccccagtgcctctcctggccctggaagttgccactccagtgcccaccagccttgtcctaataaaattaagttgcatcattttgtctgactaggtgtccttctataatattatggggtggaggggggtggtatggagcaaggggcaagttgggaagacaacctgtagggcctgcggggtctattgggaaccaagctggagtgcagtggcacaatcttggctcactgcaatctccgcctcctgggttcaagcgattctcctgcctcagcctcccgagttgttgggattccaggcatgcatgaccaggctcagctaatttttgtttttttggtagagacggggtttcaccatattggccaggctggtctccaactcctaatctcaggtgatctacccaccttggcctcccaaattgctgggattacaggcgtgaaccactgctcccttccctgtccttctgattttaaaaaaaagagaaatgttctggcacctgcacttgcactggggacagcctattttgctagtttgttttgtttcgttttgttttgatggagagcgtatgttgtttaaacgcggccgcgtagataagtagcatggcgggttaatcattaactacaaggaacccctagtgatggagttggccactccctctctgcgcgctcgctcgctcactgaggccgggcgaccaaaggtcgcccgacgcccgggctttgcccgggcggcctcagtgagcgagcgagcgcgcagttaattaaggcgccctaggccgacccttagactctgtactcagttctataaacgagccattggatacgagatccgtagattgataagggacacggaatatccccggacgcaatagacaccggtggacagcttggtatcctgagcacagtcgcgcgtccgaatctagctctactttagaggccccggattctgatggtcgtagaccgcagaaccgattggggggatgagatctactagttatcagcacacaattgcccattatacgcgcgtataatggactattgtgtgctgatatagggataacagggtaattctagagctagcatatggatccatcgatttgatgcggtattttctccttacgcatctgtgcggtatttcacaccgcatacgtcaaagcaaccatagtacgcgccctgtagcggcgcattaagcgcggcgggtgtggtggttacgcgcagcgtgaccgctacacttgccagcgccctagcgcccgctcctttcgctttcttcccttcctttctcgccacgttcgccggctttccccgtcaagctctaaatcgggggctccctttagggttccgatttagtgctttacggcacctcgaccccaaaaaacttgatttgggtgatggttcacgtagtgggccatcgccctgatagacggtttttcgccctttgacgttggagtccacgttctttaatagtggactcttgttccaaactggaacaacactcaactctatctcgggctattcttttgatttataagggattttgccgatttcggtctattggttaaaaaatgagctgatttaacaaaaatttaacgcgaattttaacaaaatattaacgtttacaattttatggtgcactctcagtacaatctgctctgatgccgcatagttaagccagccccgacacccgccaacacccgctgacgcgccctgacgggcttgtctgctcccggcatccgcttacagacaagctgtgaccgtctccgggagctgcatgtgtcagaggttttcaccgtcatcaccgaaacgcgcgagacgaaagggcctcgtgatacgcctatttttataggttaatgtcatgataataatggtttcttagacgtcaggtggcacttttcggggaaatgtgcgcggaacccctatttgtttatttttctaaatacattcaaatatgtatccgctcatgagacaataaccctgataaatgcttcaataatattgaaaaaggaagagtatgagccatattcaacgggaaacgtcgaggccgcgattaaattccaacatggatgctgatttatatgggtataaatgggctcgcgataatgtcgggcaatcaggtgcgacaatctatcgcttgtatgggaagcccgatgcgccagagttgtttctgaaacatggcaaaggtagcgttgccaatgatgttacagatgagatggtcagactaaactggctgacggaatttatgcctcttccgaccatcaagcattttatccgtactcctgatgatgcatggttactcaccactgcgatccccggaaaaacagcattccaggtattagaagaatatcctgattcaggtgaaaatattgttgatgcgctggcagtgttcctgcgccggttgcattcgattcctgtttgtaattgtccttttaacagcgatcgcgtatttcgtctcgctcaggcgcaatcacgaatgaataacggtttggttgatgcgagtgattttgatgacgagcgtaatggctggcctgttgaacaagtctggaaagaaatgcataaacttttgccattctcaccggattcagtcgtcactcatggtgatttctcacttgataaccttatttttgacgaggggaaattaataggttgtattgatgttggacgagtcggaatcgcagaccgataccaggatcttgccatcctatggaactgcctcggtgagttttctccttcattacagaaacggctttttcaaaaatatggtattgataatcctgatatgaataaattgcagtttcatttgatgctcgatgagtttttctaagcgtataatggtctagagctagcatatggatccatcgattccattatacgcctgtcagaccaagtttactcatatatactttagattgatttaaaacttcatttttaatttaaaaggatctaggtgaagatcctttttgataatctcatgaccaaaatcccttaacgtgagttttcgttccactgagcgtcagaccccgtagaaaagatcaaaggatcttcttgagatcctttttttctgcgcgtaatctgctgcttgcaaacaaaaaaaccaccgctaccagcggtggtttgtttgccggatcaagagctaccaactctttttccgaaggtaactggcttcagcagagcgcagataccaaatactgttcttctagtgtagccgtagttaggccaccacttcaagaactctgtagcaccgcctacatacctcgctctgctaatcctgttaccagtggctgctgccagtggcgataagtcgtgtcttaccgggttggactcaagacgatagttaccggataaggcgcagcggtcgggctgaacggggggttcgtgcacacagcccagcttggagcgaacgacctacaccgaactgagatacctacagcgtgagctatgagaaagcgccacgcttcccgaagggagaaaggcggacaggtatccggtaagcggcagggtcggaacaggagagcgcacgagggagcttccagggggaaacgcctggtatctttatagtcctgtcgggtttcgccacctctgacttgagcgtcgatttttgtgatgctcgtcaggggggcggagcctatggaaaaacgccagcaacgcggcctttttacggttcctggccttttgctggccttttgctcacatgt

SEQ ID NO: 483 - DNA, 8041 bp, synthetic construct
  source 1..8041: mol_type = other DNA
tctagagctagcatatggatccatcgatttagggataacagggtaattatcagcacacaattgcccattatacgcgcgtataatggactattgtgtgctgatatctgtacacttaagggctagatcttagcttacgtcactagagggtccacgtttagtttttaagatccattgatctcctaaacgctgcaagattcgcaacctggtatacttagcctaggcgctaggtcctagtgcagcgggactttttttctaaagtcgttgagaggaggagtcgtcagaccagatagctttgatgtcctgatcggaaggatcgttggcccccctgcaggcagctgttaattaactgcgcgctcgctcgctcactgaggccgcccgggcaaagcccgggcgtcgggcgacctttggtcgcccggcctcagtgagcgagcgagcgcgcagagagggagtggccaactccatcactaggggttccttgtagttaatgattaacccgccatgctacttatctacggcgcgccacgcgttctaggagttaatttttaaaaagcagtcaaaagtccaagtgcccttgcgagcatttactctctctgtttgctctggttaataatctcaggagcacaaacattccttactagttctaggagttaatttttaaaaagcagtcaaaagtccaagtgcccttgcgagcatttactctctctgtttgctctggttaataatctcaggagcacaaacattccttactagttctagagcggccgccagtgtgctggaattcggcttttttagggctggaagctacctttgacatcatttcctctgcgaatgcatgtataatttctacagaacctattagaaaggatcacccagcctctgcttttgtacaactttcccttaaaaaactgccaatcccactgctgtttggcccaatagtgagaactttttcctgctgcctcttggtgcttttgcctatggcccctattctgcctgctgaagacactcttgccagcatggacttaaacccctccagctctgacaatcctctttctcttttgttttacatgaagggtctggcagccaaagcaatcactcaaagttcaaaccttatcattttttgctttgttcctcttggccttggttttgtacatcagctttgaaaataccatcccagggttaatgctggggttaatttataactgagagtgctctagttctgcaatacaggacatgctataaaaatggaaagatgttgctttctgagagatcaggtggattcttgggcatttgcttaagcttggtaccttttttatgggagtgagacatcctccttgttctcatagactgctggctgtgtgtgctctggtgtctctggccaccatggagtttgggctgagctgggtctttctggtggccctgctgaagggagtccagtgtgagcagcagggagcttctagacctggacctagagatgctcaggctcatcctggaagacctagagctgtgcctacacagtgtgatgtgcctcctaattctagatttgattgtgctcctgataaggctataacacaggagcagtgtgaggctagaggatgttgttatattcctgctaagcagggactgcagggagctcagatgggacagccttggtgtttttttcctccttcttatccttcttataagctggagaatctgtcttcttctgagatgggatatacagctacactgacaagaacaacacctacattttttcctaaggatattctgacactgagactggatgtgatgatggagacagagaatagactgcattttacaattaaggatcctgctaatagaagatatgaggtgcctctagagacacctagagtgcattctagagctccttctcctctgtattctgtggagttttctgaggagccttttggagtgattgtgcatagacagctggatggaagagtgctgctgaatacaacagtggctcctctgttttttgctgatcagtttctgcagctgtctacatctctgccttctcagtatattacaggactggctgagcatctgtctcctctgatgctgtctacatcttggacaagaattacactgtggaatagagatctggctcctacacctggagctaatctgtatggatctcatcctttttatctggctctggaggatggaggatctgctcatggagtgtttctgctgaattctaatgctatggatgtagtgctgcagccttctcctgctctgtcttggagatctacaggaggaattctggatgtgtatatttttctaggacctgagcctaagtctgtggtgcagcagtatctggatgtagtgggatatccttttatgcctccttattggggactgggatttcatctgtgtagatggggatattcttctacagctattacaagacaggtggttgagaatatgacaagagctcattttcctctggatgtgcagtggaatgatctagattatatggattctagaagagattttacatttaataaggatggatttagagattttcctgctatggtgcaggagctgcatcagggaggaagaagatatatgatgattgtggatcctgctatttcttcttctggacctgctggatcttatagaccttatgatgagggactgagaagaggagtgtttattacaaatgagacaggacagcctctgattggaaaggtgtggcctggatctacagcttttcctgattttacaaatcctacagctctggcttggtgggaggatatggtggctgagtttcatgatcaggtgccttttgatggaatgtggattgatatgaatgagccttctaattttataagaggatctgaggatggatgtcctaataatgagctagagaatcctccttatgtgcctggagtagtgggaggaacactgcaggctgctacaatttgtgcttcttctcatcagtttctgtctacacattataatctgcataatctgtatggactgacagaggctattgcttctcatagagctctggtgaaggctagaggaacaagaccttttgtgatttctagatctacatttgctggacatggaagatatgctggacattggacaggagatgtatggtcttcttgggagcagctagcttcttctgtgcctgagattctgcagtttaatctgctaggagtgcctctggtgggagctgatgtgtgtggatttctgggaaatacatctgaggagctgtgtgtgagatggacacagctgggagctttttatccttttatgagaaatcataattctctgctgtctctgcctcaggagccttattctttttctgagcctgctcagcaggctatgagaaaggctctgacactgagatatgctctgctgcctcatctgtatacactgtttcatcaggctcatgtggctggagagacagtagctagacctctgtttctggagtttcctaaggattcttctacatggacagttgatcatcagctgctgtggggagaggctctgctgattacacctgtgctgcaggctggaaaggctgaggtgacaggatattttcctctgggaacatggtatgatctgcagacagtgcctatagaggctctgggatctctgcctcctcctcctgctgctcctagagagcctgctattcattctgagggacagtgggtgacactgcctgctcctctggatacaattaatgtgcatctgagagctggatatattattcctctgcagggacctggactgacaacaacagagtctagacagcagcctatggctctggctgtggctctgacaaagggaggagaggctagaggagagctgttttgggatgatggagagtctctggaggtgctggagagaggagcttatacacaggtgatttttctggctagaaataatacaattgtgaatgagctggtgagagtgacatctgagggagctggactgcagctgcagaaggtgacagtgctgggagtggctacagctcctcagcaggtgctgtctaatggagtgcctgtgtctaattttacatattctcctgatacaaaggtgctggatatttgtgtgtctctgctgatgggagagcagtttctggtgtcttggtgttaatgatttaaatctcgagccgggcggagtgtgttagtctctccagagggaggctggttccccagggaagcagagcctgtgtgcgggcagcagctgtgtgcgggcctgggggttgttaagtgcaattatttttaataaaaggggcatttggaaaaaaaaaaaaaaggtagcagtcgacagatgaattctgcagatctgtggcttctagctgcccgggtggcatccctgtgacccctccccagtgcctctcctggccctggaagttgccactccagtgcccaccagccttgtcctaataaaattaagttgcatcattttgtctgactaggtgtccttctataatattatggggtggaggggggtggtatggagcaaggggcaagttgggaagacaacctgtagggcctgcggggtctattgggaaccaagctggagtgcagtggcacaatcttggctcactgcaatctccgcctcctgggttcaagcgattctcctgcctcagcctcccgagttgttgggattccaggcatgcatgaccaggctcagctaatttttgtttttttggtagagacggggtttcaccatattggccaggctggtctccaactcctaatctcaggtgatctacccaccttggcctcccaaattgctgggattacaggcgtgaaccactgctcccttccctgtccttctgattttaaaaaaaagagaaatgttctggcacctgcacttgcactggggacagcctattttgctagtttgttttgtttcgttttgttttgatggagagcgtatgttgtttaaacgcggccgcgtagataagtagcatggcgggttaatcattaactacaaggaacccctagtgatggagttggccactccctctctgcgcgctcgctcgctcactgaggccgggcgaccaaaggtcgcccgacgcccgggctttgcccgggcggcctcagtgagcgagcgagcgcgcagttaattaaggcgccctaggccgacccttagactctgtactcagttctataaacgagccattggatacgagatccgtagattgataagggacacggaatatccccggacgcaatagacaccggtggacagcttggtatcctgagcacagtcgcgcgtccgaatctagctctactttagaggccccggattctgatggtcgtagaccgcagaaccgattggggggatgagatctactagttatcagcacacaattgcccattatacgcgcgtataatggactattgtgtgctgatatagggataacagggtaattctagagctagcatatggatccatcgatttgatgcggtattttctccttacgcatctgtgcggtatttcacaccgcatacgtcaaagcaaccatagtacgcgccctgtagcggcgcattaagcgcggcgggtgtggtggttacgcgcagcgtgaccgctacacttgccagcgccctagcgcccgctcctttcgctttcttcccttcctttctcgccacgttcgccggctttccccgtcaagctctaaatcgggggctccctttagggttccgatttagtgctttacggcacctcgaccccaaaaaacttgatttgggtgatggttcacgtagtgggccatcgccctgatagacggtttttcgccctttgacgttggagtccacgttctttaatagtggactcttgttccaaactggaacaacactcaactctatctcgggctattcttttgatttataagggattttgccgatttcggtctattggttaaaaaatgagctgatttaacaaaaatttaacgcgaattttaacaaaatattaacgtttacaattttatggtgcactctcagtacaatctgctctgatgccgcatagttaagccagccccgacacccgccaacacccgctgacgcgccctgacgggcttgtctgctcccggcatccgcttacagacaagctgtgaccgtctccgggagctgcatgtgtcagaggttttcaccgtcatcaccgaaacgcgcgagacgaaagggcctcgtgatacgcctatttttataggttaatgtcatgataataatggtttcttagacgtcaggtggcacttttcggggaaatgtgcgcggaacccctatttgtttatttttctaaatacattcaaatatgtatccgctcatgagacaataaccctgataaatgcttcaataatattgaaaaaggaagagtatgagccatattcaacgggaaacgtcgaggccgcgattaaattccaacatggatgctgatttatatgggtataaatgggctcgcgataatgtcgggcaatcaggtgcgacaatctatcgcttgtatgggaagcccgatgcgccagagttgtttctgaaacatggcaaaggtagcgttgccaatgatgttacagatgagatggtcagactaaactggctgacggaatttatgcctcttccgaccatcaagcattttatccgtactcctgatgatgcatggttactcaccactgcgatccccggaaaaacagcattccaggtattagaagaatatcctgattcaggtgaaaatattgttgatgcgctggcagtgttcctgcgccggttgcattcgattcctgtttgtaattgtccttttaacagcgatcgcgtatttcgtctcgctcaggcgcaatcacgaatgaataacggtttggttgatgcgagtgattttgatgacgagcgtaatggctggcctgttgaacaagtctggaaagaaatgcataaacttttgccattctcaccggattcagtcgtcactcatggtgatttctcacttgataaccttatttttgacgaggggaaattaataggttgtattgatgttggacgagtcggaatcgcagaccgataccaggatcttgccatcctatggaactgcctcggtgagttttctccttcattacagaaacggctttttcaaaaatatggtattgataatcctgatatgaataaattgcagtttcatttgatgctcgatgagtttttctaagcgtataatggtctagagctagcatatggatccatcgattccattatacgcctgtcagaccaagtttactcatatatactttagattgatttaaaacttcatttttaatttaaaaggatctaggtgaagatcctttttgataatctcatgaccaaaatcccttaacgtgagttttcgttccactgagcgtcagaccccgtagaaaagatcaaaggatcttcttgagatcctttttttctgcgcgtaatctgctgcttgcaaacaaaaaaaccaccgctaccagcggtggtttgtttgccggatcaagagctaccaactctttttccgaaggtaactggcttcagcagagcgcagataccaaatactgttcttctagtgtagccgtagttaggccaccacttcaagaactctgtagcaccgcctacatacctcgctctgctaatcctgttaccagtggctgctgccagtggcgataagtcgtgtcttaccgggttggactcaagacgatagttaccggataaggcgcagcggtcgggctgaacggggggttcgtgcacacagcccagcttggagcgaacgacctacaccgaactgagatacctacagcgtgagctatgagaaagcgccacgcttcccgaagggagaaaggcggacaggtatccggtaagcggcagggtcggaacaggagagcgcacgagggagcttccagggggaaacgcctggtatctttatagtcctgtcgggtttcgccacctctgacttgagcgtcgatttttgtgatgctcgtcaggggggcggagcctatggaaaaacgccagcaacgcggcctttttacggttcctggccttttgctggccttttgctcacatgt

SEQ ID NO: 484 - DNA, 7972 bp, synthetic construct
  source 1..7972: mol_type = other DNA
tctagagctagcatatggatccatcgatttagggataacagggtaattatcagcacacaattgcccattatacgcgcgtataatggactattgtgtgctgatatctgtacacttaagggctagatcttagcttacgtcactagagggtccacgtttagtttttaagatccattgatctcctaaacgctgcaagattcgcaacctggtatacttagcctaggcgctaggtcctagtgcagcgggactttttttctaaagtcgttgagaggaggagtcgtcagaccagatagctttgatgtcctgatcggaaggatcgttggcccccctgcaggcagctgttaattaactgcgcgctcgctcgctcactgaggccgcccgggcaaagcccgggcgtcgggcgacctttggtcgcccggcctcagtgagcgagcgagcgcgcagagagggagtggccaactccatcactaggggttccttgtagttaatgattaacccgccatgctacttatctacggcgcgccacgcgttctaggagttaatttttaaaaagcagtcaaaagtccaagtgcccttgcgagcatttactctctctgtttgctctggttaataatctcaggagcacaaacattccttactagttctaggagttaatttttaaaaagcagtcaaaagtccaagtgcccttgcgagcatttactctctctgtttgctctggttaataatctcaggagcacaaacattccttactagttctagagcggccgccagtgtgctggaattcggcttttttagggctggaagctacctttgacatcatttcctctgcgaatgcatgtataatttctacagaacctattagaaaggatcacccagcctctgcttttgtacaactttcccttaaaaaactgccaatcccactgctgtttggcccaatagtgagaactttttcctgctgcctcttggtgcttttgcctatggcccctattctgcctgctgaagacactcttgccagcatggacttaaacccctccagctctgacaatcctctttctcttttgttttacatgaagggtctggcagccaaagcaatcactcaaagttcaaaccttatcattttttgctttgttcctcttggccttggttttgtacatcagctttgaaaataccatcccagggttaatgctggggttaatttataactgagagtgctctagttctgcaatacaggacatgctataaaaatggaaagatgttgctttctgagagatcaggtggattcttgggcatttgcttaagcttggtaccgccaccatggggtacagaatgcagctgctgtcctgcattgcactgtcactggcactggttaccaactcacagcagggggccagcaggccaggccccagggatgcccaggcccaccctggcagacccagggctgtgcccacccagtgtgatgtgcctcccaacagcagatttgactgtgcccctgataaggccattactcaggaacagtgtgaggccaggggctgctgctatatccctgccaagcagggcctgcagggggcccagatggggcagccctggtgcttcttcccccccagctacccctcttataagctggagaatctgagcagctctgaaatgggctacactgccactctgaccaggactacccccaccttcttccccaaggatattctgactctgaggctggatgtgatgatggagactgagaacaggctgcacttcaccatcaaggaccctgccaacaggaggtatgaggtgcccctggaaactcccagggtgcactctagggcccccagccccctgtattctgtggagttctctgaggagccttttggggtcattgtccacaggcagctggatggcagggtgctgctgaatactactgtggcccctctgttctttgctgaccagttcctgcagctgagcaccagcctgccttctcagtacattactggcctggctgagcatctgagccccctgatgctgagcacctcttggaccagaatcaccctgtggaacagggacctggctcccactcctggggccaacctgtatggcagccaccccttctacctggccctggaggatgggggctctgcccatggggtgttcctgctgaacagcaatgccatggatgtggtgctgcagccctctcctgccctgtcttggagatctactgggggcatcctggatgtgtatatcttcctggggcctgagcccaagtctgtggtgcagcagtacctggatgtggtgggctaccccttcatgcccccctactggggcctgggcttccacctgtgcaggtggggctactcttctactgctatcaccaggcaggtggtggagaacatgaccagggctcacttccctctggatgtgcagtggaatgacctggactacatggactctaggagagacttcacttttaataaggatgggttcagggactttcctgccatggtgcaggagctgcatcaggggggcaggagatatatgatgattgtggaccctgctatttctagctctggccctgctggcagctataggccctatgatgaggggctgaggaggggggtgttcatcactaatgagactggccagcccctgattggcaaggtgtggcctggctctactgccttccctgatttcaccaaccccactgccctggcctggtgggaggatatggtggctgagtttcatgaccaggtgccctttgatggcatgtggattgacatgaatgagcccagcaactttatcaggggctctgaagatggctgccccaacaatgagctggagaaccccccctatgtgcctggggtggtggggggcaccctgcaggctgccaccatctgtgccagcagccaccagttcctgagcacccactataacctgcacaacctgtatggcctgactgaggccattgcctctcacagggccctggtgaaggctagggggactaggccctttgtgatcagcaggtctacttttgctggccatggcaggtatgctgggcactggactggggatgtgtggtctagctgggagcagctggccagctctgtgcctgagatcctgcagtttaatctgctgggggtgcccctggtgggggctgatgtgtgtggcttcctgggcaatacctctgaggagctgtgtgtgaggtggactcagctgggggctttctaccccttcatgagaaaccacaactctctgctgagcctgccccaggagccctattctttttctgagcctgcccagcaggctatgaggaaggccctgactctgaggtatgccctgctgccccacctgtataccctgttccatcaggcccatgtggctggggagactgtggccagacctctgttcctggagttccccaaggatagctctacttggactgtggaccaccagctgctgtggggggaggctctgctgatcacccctgtgctgcaggctgggaaggctgaggtgactggctatttccccctgggcacctggtatgatctgcagactgtgcccattgaggccctgggctctctgccccctccccctgctgcccccagggagcctgccatccactctgagggccagtgggtgaccctgcctgcccctctggacactatcaatgtgcacctgagggctggctacatcatccccctgcagggccctggcctgactaccactgagtctaggcagcagcccatggccctggctgtggctctgaccaaggggggggaggccaggggggagctgttctgggatgatggggagtctctggaggtgctggagaggggggcctacacccaggtgatcttcctggctaggaataacaccattgtcaatgagctggtgagggtgacctctgagggggctggcctgcagctgcagaaggtgactgtgctgggggtggctactgccccccagcaggtgctgagcaatggggtgcctgtgagcaacttcacctatagccctgacaccaaggtgctggacatctgtgtgagcctgctgatgggggagcagttcctggtgagctggtgctaatttaaatctcgagccgggcggagtgtgttagtctctccagagggaggctggttccccagggaagcagagcctgtgtgcgggcagcagctgtgtgcgggcctgggggttgttaagtgcaattatttttaataaaaggggcatttggaaaaaaaaaaaaaaggtagcagtcgacagatgaattctgcagatctgtggcttctagctgcccgggtggcatccctgtgacccctccccagtgcctctcctggccctggaagttgccactccagtgcccaccagccttgtcctaataaaattaagttgcatcattttgtctgactaggtgtccttctataatattatggggtggaggggggtggtatggagcaaggggcaagttgggaagacaacctgtagggcctgcggggtctattgggaaccaagctggagtgcagtggcacaatcttggctcactgcaatctccgcctcctgggttcaagcgattctcctgcctcagcctcccgagttgttgggattccaggcatgcatgaccaggctcagctaatttttgtttttttggtagagacggggtttcaccatattggccaggctggtctccaactcctaatctcaggtgatctacccaccttggcctcccaaattgctgggattacaggcgtgaaccactgctcccttccctgtccttctgattttaaaaaaaagagaaatgttctggcacctgcacttgcactggggacagcctattttgctagtttgttttgtttcgttttgttttgatggagagcgtatgttgtttaaacgcggccgcgtagataagtagcatggcgggttaatcattaactacaaggaacccctagtgatggagttggccactccctctctgcgcgctcgctcgctcactgaggccgggcgaccaaaggtcgcccgacgcccgggctttgcccgggcggcctcagtgagcgagcgagcgcgcagttaattaaggcgccctaggccgacccttagactctgtactcagttctataaacgagccattggatacgagatccgtagattgataagggacacggaatatccccggacgcaatagacaccggtggacagcttggtatcctgagcacagtcgcgcgtccgaatctagctctactttagaggccccggattctgatggtcgtagaccgcagaaccgattggggggatgagatctactagttatcagcacacaattgcccattatacgcgcgtataatggactattgtgtgctgatatagggataacagggtaattctagagctagcatatggatccatcgatttgatgcggtattttctccttacgcatctgtgcggtatttcacaccgcatacgtcaaagcaaccatagtacgcgccctgtagcggcgcattaagcgcggcgggtgtggtggttacgcgcagcgtgaccgctacacttgccagcgccctagcgcccgctcctttcgctttcttcccttcctttctcgccacgttcgccggctttccccgtcaagctctaaatcgggggctccctttagggttccgatttagtgctttacggcacctcgaccccaaaaaacttgatttgggtgatggttcacgtagtgggccatcgccctgatagacggtttttcgccctttgacgttggagtccacgttctttaatagtggactcttgttccaaactggaacaacactcaactctatctcgggctattcttttgatttataagggattttgccgatttcggtctattggttaaaaaatgagctgatttaacaaaaatttaacgcgaattttaacaaaatattaacgtttacaattttatggtgcactctcagtacaatctgctctgatgccgcatagttaagccagccccgacacccgccaacacccgctgacgcgccctgacgggcttgtctgctcccggcatccgcttacagacaagctgtgaccgtctccgggagctgcatgtgtcagaggttttcaccgtcatcaccgaaacgcgcgagacgaaagggcctcgtgatacgcctatttttataggttaatgtcatgataataatggtttcttagacgtcaggtggcacttttcggggaaatgtgcgcggaacccctatttgtttatttttctaaatacattcaaatatgtatccgctcatgagacaataaccctgataaatgcttcaataatattgaaaaaggaagagtatgagccatattcaacgggaaacgtcgaggccgcgattaaattccaacatggatgctgatttatatgggtataaatgggctcgcgataatgtcgggcaatcaggtgcgacaatctatcgcttgtatgggaagcccgatgcgccagagttgtttctgaaacatggcaaaggtagcgttgccaatgatgttacagatgagatggtcagactaaactggctgacggaatttatgcctcttccgaccatcaagcattttatccgtactcctgatgatgcatggttactcaccactgcgatccccggaaaaacagcattccaggtattagaagaatatcctgattcaggtgaaaatattgttgatgcgctggcagtgttcctgcgccggttgcattcgattcctgtttgtaattgtccttttaacagcgatcgcgtatttcgtctcgctcaggcgcaatcacgaatgaataacggtttggttgatgcgagtgattttgatgacgagcgtaatggctggcctgttgaacaagtctggaaagaaatgcataaacttttgccattctcaccggattcagtcgtcactcatggtgatttctcacttgataaccttatttttgacgaggggaaattaataggttgtattgatgttggacgagtcggaatcgcagaccgataccaggatcttgccatcctatggaactgcctcggtgagttttctccttcattacagaaacggctttttcaaaaatatggtattgataatcctgatatgaataaattgcagtttcatttgatgctcgatgagtttttctaagcgtataatggtctagagctagcatatggatccatcgattccattatacgcctgtcagaccaagtttactcatatatactttagattgatttaaaacttcatttttaatttaaaaggatctaggtgaagatcctttttgataatctcatgaccaaaatcccttaacgtgagttttcgttccactgagcgtcagaccccgtagaaaagatcaaaggatcttcttgagatcctttttttctgcgcgtaatctgctgcttgcaaacaaaaaaaccaccgctaccagcggtggtttgtttgccggatcaagagctaccaactctttttccgaaggtaactggcttcagcagagcgcagataccaaatactgttcttctagtgtagccgtagttaggccaccacttcaagaactctgtagcaccgcctacatacctcgctctgctaatcctgttaccagtggctgctgccagtggcgataagtcgtgtcttaccgggttggactcaagacgatagttaccggataaggcgcagcggtcgggctgaacggggggttcgtgcacacagcccagcttggagcgaacgacctacaccgaactgagatacctacagcgtgagctatgagaaagcgccacgcttcccgaagggagaaaggcggacaggtatccggtaagcggcagggtcggaacaggagagcgcacgagggagcttccagggggaaacgcctggtatctttatagtcctgtcgggtttcgccacctctgacttgagcgtcgatttttgtgatgctcgtcaggggggcggagcctatggaaaaacgccagcaacgcggcctttttacggttcctggccttttgctggccttttgctcacatgt

SEQ ID NO: 485 - DNA, 7972 bp, synthetic construct
  source 1..7972: mol_type = other DNA
tctagagctagcatatggatccatcgatttagggataacagggtaattatcagcacacaattgcccattatacgcgcgtataatggactattgtgtgctgatatctgtacacttaagggctagatcttagcttacgtcactagagggtccacgtttagtttttaagatccattgatctcctaaacgctgcaagattcgcaacctggtatacttagcctaggcgctaggtcctagtgcagcgggactttttttctaaagtcgttgagaggaggagtcgtcagaccagatagctttgatgtcctgatcggaaggatcgttggcccccctgcaggcagctgttaattaactgcgcgctcgctcgctcactgaggccgcccgggcaaagcccgggcgtcgggcgacctttggtcgcccggcctcagtgagcgagcgagcgcgcagagagggagtggccaactccatcactaggggttccttgtagttaatgattaacccgccatgctacttatctacggcgcgccacgcgttctaggagttaatttttaaaaagcagtcaaaagtccaagtgcccttgcgagcatttactctctctgtttgctctggttaataatctcaggagcacaaacattccttactagttctaggagttaatttttaaaaagcagtcaaaagtccaagtgcccttgcgagcatttactctctctgtttgctctggttaataatctcaggagcacaaacattccttactagttctagagcggccgccagtgtgctggaattcggcttttttagggctggaagctacctttgacatcatttcctctgcgaatgcatgtataatttctacagaacctattagaaaggatcacccagcctctgcttttgtacaactttcccttaaaaaactgccaatcccactgctgtttggcccaatagtgagaactttttcctgctgcctcttggtgcttttgcctatggcccctattctgcctgctgaagacactcttgccagcatggacttaaacccctccagctctgacaatcctctttctcttttgttttacatgaagggtctggcagccaaagcaatcactcaaagttcaaaccttatcattttttgctttgttcctcttggccttggttttgtacatcagctttgaaaataccatcccagggttaatgctggggttaatttataactgagagtgctctagttctgcaatacaggacatgctataaaaatggaaagatgttgctttctgagagatcaggtggattcttgggcatttgcttaagcttggtaccgccaccatgggggagtttgggctgagctgggtctttctggtggccctgctgaagggagtccagtgtgagcagcagggggccagcaggccaggccccagggatgcccaggcccaccctggcagacccagggctgtgcccacccagtgtgatgtgcctcccaacagcagatttgactgtgcccctgataaggccattactcaggaacagtgtgaggccaggggctgctgctatatccctgccaagcagggcctgcagggggcccagatggggcagccctggtgcttcttcccccccagctacccctcttataagctggagaatctgagcagctctgaaatgggctacactgccactctgaccaggactacccccaccttcttccccaaggatattctgactctgaggctggatgtgatgatggagactgagaacaggctgcacttcaccatcaaggaccctgccaacaggaggtatgaggtgcccctggaaactcccagggtgcactctagggcccccagccccctgtattctgtggagttctctgaggagccttttggggtcattgtccacaggcagctggatggcagggtgctgctgaatactactgtggcccctctgttctttgctgaccagttcctgcagctgagcaccagcctgccttctcagtacattactggcctggctgagcatctgagccccctgatgctgagcacctcttggaccagaatcaccctgtggaacagggacctggctcccactcctggggccaacctgtatggcagccaccccttctacctggccctggaggatgggggctctgcccatggggtgttcctgctgaacagcaatgccatggatgtggtgctgcagccctctcctgccctgtcttggagatctactgggggcatcctggatgtgtatatcttcctggggcctgagcccaagtctgtggtgcagcagtacctggatgtggtgggctaccccttcatgcccccctactggggcctgggcttccacctgtgcaggtggggctactcttctactgctatcaccaggcaggtggtggagaacatgaccagggctcacttccctctggatgtgcagtggaatgacctggactacatggactctaggagagacttcacttttaataaggatgggttcagggactttcctgccatggtgcaggagctgcatcaggggggcaggagatatatgatgattgtggaccctgctatttctagctctggccctgctggcagctataggccctatgatgaggggctgaggaggggggtgttcatcactaatgagactggccagcccctgattggcaaggtgtggcctggctctactgccttccctgatttcaccaaccccactgccctggcctggtgggaggatatggtggctgagtttcatgaccaggtgccctttgatggcatgtggattgacatgaatgagcccagcaactttatcaggggctctgaagatggctgccccaacaatgagctggagaaccccccctatgtgcctggggtggtggggggcaccctgcaggctgccaccatctgtgccagcagccaccagttcctgagcacccactataacctgcacaacctgtatggcctgactgaggccattgcctctcacagggccctggtgaaggctagggggactaggccctttgtgatcagcaggtctacttttgctggccatggcaggtatgctgggcactggactggggatgtgtggtctagctgggagcagctggccagctctgtgcctgagatcctgcagtttaatctgctgggggtgcccctggtgggggctgatgtgtgtggcttcctgggcaatacctctgaggagctgtgtgtgaggtggactcagctgggggctttctaccccttcatgagaaaccacaactctctgctgagcctgccccaggagccctattctttttctgagcctgcccagcaggctatgaggaaggccctgactctgaggtatgccctgctgccccacctgtataccctgttccatcaggcccatgtggctggggagactgtggccagacctctgttcctggagttccccaaggatagctctacttggactgtggaccaccagctgctgtggggggaggctctgctgatcacccctgtgctgcaggctgggaaggctgaggtgactggctatttccccctgggcacctggtatgatctgcagactgtgcccattgaggccctgggctctctgccccctccccctgctgcccccagggagcctgccatccactctgagggccagtgggtgaccctgcctgcccctctggacactatcaatgtgcacctgagggctggctacatcatccccctgcagggccctggcctgactaccactgagtctaggcagcagcccatggccctggctgtggctctgaccaaggggggggaggccaggggggagctgttctgggatgatggggagtctctggaggtgctggagaggggggcctacacccaggtgatcttcctggctaggaataacaccattgtcaatgagctggtgagggtgacctctgagggggctggcctgcagctgcagaaggtgactgtgctgggggtggctactgccccccagcaggtgctgagcaatggggtgcctgtgagcaacttcacctatagccctgacaccaaggtgctggacatctgtgtgagcctgctgatgggggagcagttcctggtgagctggtgctaatttaaatctcgagccgggcggagtgtgttagtctctccagagggaggctggttccccagggaagcagagcctgtgtgcgggcagcagctgtgtgcgggcctgggggttgttaagtgcaattatttttaataaaaggggcatttggaaaaaaaaaaaaaaggtagcagtcgacagatgaattctgcagatctgtggcttctagctgcccgggtggcatccctgtgacccctccccagtgcctctcctggccctggaagttgccactccagtgcccaccagccttgtcctaataaaattaagttgcatcattttgtctgactaggtgtccttctataatattatggggtggaggggggtggtatggagcaaggggcaagttgggaagacaacctgtagggcctgcggggtctattgggaaccaagctggagtgcagtggcacaatcttggctcactgcaatctccgcctcctgggttcaagcgattctcctgcctcagcctcccgagttgttgggattccaggcatgcatgaccaggctcagctaatttttgtttttttggtagagacggggtttcaccatattggccaggctggtctccaactcctaatctcaggtgatctacccaccttggcctcccaaattgctgggattacaggcgtgaaccactgctcccttccctgtccttctgattttaaaaaaaagagaaatgttctggcacctgcacttgcactggggacagcctattttgctagtttgttttgtttcgttttgttttgatggagagcgtatgttgtttaaacgcggccgcgtagataagtagcatggcgggttaatcattaactacaaggaacccctagtgatggagttggccactccctctctgcgcgctcgctcgctcactgaggccgggcgaccaaaggtcgcccgacgcccgggctttgcccgggcggcctcagtgagcgagcgagcgcgcagttaattaaggcgccctaggccgacccttagactctgtactcagttctataaacgagccattggatacgagatccgtagattgataagggacacggaatatccccggacgcaatagacaccggtggacagcttggtatcctgagcacagtcgcgcgtccgaatctagctctactttagaggccccggattctgatggtcgtagaccgcagaaccgattggggggatgagatctactagttatcagcacacaattgcccattatacgcgcgtataatggactattgtgtgctgatatagggataacagggtaattctagagctagcatatggatccatcgatttgatgcggtattttctccttacgcatctgtgcggtatttcacaccgcatacgtcaaagcaaccatagtacgcgccctgtagcggcgcattaagcgcggcgggtgtggtggttacgcgcagcgtgaccgctacacttgccagcgccctagcgcccgctcctttcgctttcttcccttcctttctcgccacgttcgccggctttccccgtcaagctctaaatcgggggctccctttagggttccgatttagtgctttacggcacctcgaccccaaaaaacttgatttgggtgatggttcacgtagtgggccatcgccctgatagacggtttttcgccctttgacgttggagtccacgttctttaatagtggactcttgttccaaactggaacaacactcaactctatctcgggctattcttttgatttataagggattttgccgatttcggtctattggttaaaaaatgagctgatttaacaaaaatttaacgcgaattttaacaaaatattaacgtttacaattttatggtgcactctcagtacaatctgctctgatgccgcatagttaagccagccccgacacccgccaacacccgctgacgcgccctgacgggcttgtctgctcccggcatccgcttacagacaagctgtgaccgtctccgggagctgcatgtgtcagaggttttcaccgtcatcaccgaaacgcgcgagacgaaagggcctcgtgatacgcctatttttataggttaatgtcatgataataatggtttcttagacgtcaggtggcacttttcggggaaatgtgcgcggaacccctatttgtttatttttctaaatacattcaaatatgtatccgctcatgagacaataaccctgataaatgcttcaataatattgaaaaaggaagagtatgagccatattcaacgggaaacgtcgaggccgcgattaaattccaacatggatgctgatttatatgggtataaatgggctcgcgataatgtcgggcaatcaggtgcgacaatctatcgcttgtatgggaagcccgatgcgccagagttgtttctgaaacatggcaaaggtagcgttgccaatgatgttacagatgagatggtcagactaaactggctgacggaatttatgcctcttccgaccatcaagcattttatccgtactcctgatgatgcatggttactcaccactgcgatccccggaaaaacagcattccaggtattagaagaatatcctgattcaggtgaaaatattgttgatgcgctggcagtgttcctgcgccggttgcattcgattcctgtttgtaattgtccttttaacagcgatcgcgtatttcgtctcgctcaggcgcaatcacgaatgaataacggtttggttgatgcgagtgattttgatgacgagcgtaatggctggcctgttgaacaagtctggaaagaaatgcataaacttttgccattctcaccggattcagtcgtcactcatggtgatttctcacttgataaccttatttttgacgaggggaaattaataggttgtattgatgttggacgagtcggaatcgcagaccgataccaggatcttgccatcctatggaactgcctcggtgagttttctccttcattacagaaacggctttttcaaaaatatggtattgataatcctgatatgaataaattgcagtttcatttgatgctcgatgagtttttctaagcgtataatggtctagagctagcatatggatccatcgattccattatacgcctgtcagaccaagtttactcatatatactttagattgatttaaaacttcatttttaatttaaaaggatctaggtgaagatcctttttgataatctcatgaccaaaatcccttaacgtgagttttcgttccactgagcgtcagaccccgtagaaaagatcaaaggatcttcttgagatcctttttttctgcgcgtaatctgctgcttgcaaacaaaaaaaccaccgctaccagcggtggtttgtttgccggatcaagagctaccaactctttttccgaaggtaactggcttcagcagagcgcagataccaaatactgttcttctagtgtagccgtagttaggccaccacttcaagaactctgtagcaccgcctacatacctcgctctgctaatcctgttaccagtggctgctgccagtggcgataagtcgtgtcttaccgggttggactcaagacgatagttaccggataaggcgcagcggtcgggctgaacggggggttcgtgcacacagcccagcttggagcgaacgacctacaccgaactgagatacctacagcgtgagctatgagaaagcgccacgcttcccgaagggagaaaggcggacaggtatccggtaagcggcagggtcggaacaggagagcgcacgagggagcttccagggggaaacgcctggtatctttatagtcctgtcgggtttcgccacctctgacttgagcgtcgatttttgtgatgctcgtcaggggggcggagcctatggaaaaacgccagcaacgcggcctttttacggttcctggccttttgctggccttttgctcacatgt

SEQ ID NO: 486 - DNA, 7975 bp, synthetic construct
  source 1..7975: mol_type = other DNA
tctagagctagcatatggatccatcgatttagggataacagggtaattatcagcacacaattgcccattatacgcgcgtataatggactattgtgtgctgatatctgtacacttaagggctagatcttagcttacgtcactagagggtccacgtttagtttttaagatccattgatctcctaaacgctgcaagattcgcaacctggtatacttagcctaggcgctaggtcctagtgcagcgggactttttttctaaagtcgttgagaggaggagtcgtcagaccagatagctttgatgtcctgatcggaaggatcgttggcccccctgcaggcagctgttaattaactgcgcgctcgctcgctcactgaggccgcccgggcaaagcccgggcgtcgggcgacctttggtcgcccggcctcagtgagcgagcgagcgcgcagagagggagtggccaactccatcactaggggttccttgtagttaatgattaacccgccatgctacttatctacggcgcgccacgcgttctaggagttaatttttaaaaagcagtcaaaagtccaagtgcccttgcgagcatttactctctctgtttgctctggttaataatctcaggagcacaaacattccttactagttctaggagttaatttttaaaaagcagtcaaaagtccaagtgcccttgcgagcatttactctctctgtttgctctggttaataatctcaggagcacaaacattccttactagttctagagcggccgccagtgtgctggaattcggcttttttagggctggaagctacctttgacatcatttcctctgcgaatgcatgtataatttctacagaacctattagaaaggatcacccagcctctgcttttgtacaactttcccttaaaaaactgccaatcccactgctgtttggcccaatagtgagaactttttcctgctgcctcttggtgcttttgcctatggcccctattctgcctgctgaagacactcttgccagcatggacttaaacccctccagctctgacaatcctctttctcttttgttttacatgaagggtctggcagccaaagcaatcactcaaagttcaaaccttatcattttttgctttgttcctcttggccttggttttgtacatcagctttgaaaataccatcccagggttaatgctggggttaatttataactgagagtgctctagttctgcaatacaggacatgctataaaaatggaaagatgttgctttctgagagatcaggtggattcttgggcatttgcttaagcttggtaccgccaccatggggtacagaatgcagctgctgtcctgcattgcactgtcactggcactggttaccaactcacagcagggagcttctagacctggacctagagatgctcaggctcatcctggaagacctagagctgtgcctacacagtgtgatgtgcctcctaattctagatttgattgtgctcctgataaggctataacacaggagcagtgtgaggctagaggatgttgttatattcctgctaagcagggactgcagggagctcagatgggacagccttggtgtttttttcctccttcttatccttcttataagctggagaatctgtcttcttctgagatgggatatacagctacactgacaagaacaacacctacattttttcctaaggatattctgacactgagactggatgtgatgatggagacagagaatagactgcattttacaattaaggatcctgctaatagaagatatgaggtgcctctagagacacctagagtgcattctagagctccttctcctctgtattctgtggagttttctgaggagccttttggagtgattgtgcatagacagctggatggaagagtgctgctgaatacaacagtggctcctctgttttttgctgatcagtttctgcagctgtctacatctctgccttctcagtatattacaggactggctgagcatctgtctcctctgatgctgtctacatcttggacaagaattacactgtggaatagagatctggctcctacacctggagctaatctgtatggatctcatcctttttatctggctctggaggatggaggatctgctcatggagtgtttctgctgaattctaatgctatggatgtagtgctgcagccttctcctgctctgtcttggagatctacaggaggaattctggatgtgtatatttttctaggacctgagcctaagtctgtggtgcagcagtatctggatgtagtgggatatccttttatgcctccttattggggactgggatttcatctgtgtagatggggatattcttctacagctattacaagacaggtggttgagaatatgacaagagctcattttcctctggatgtgcagtggaatgatctagattatatggattctagaagagattttacatttaataaggatggatttagagattttcctgctatggtgcaggagctgcatcagggaggaagaagatatatgatgattgtggatcctgctatttcttcttctggacctgctggatcttatagaccttatgatgagggactgagaagaggagtgtttattacaaatgagacaggacagcctctgattggaaaggtgtggcctggatctacagcttttcctgattttacaaatcctacagctctggcttggtgggaggatatggtggctgagtttcatgatcaggtgccttttgatggaatgtggattgatatgaatgagccttctaattttataagaggatctgaggatggatgtcctaataatgagctagagaatcctccttatgtgcctggagtagtgggaggaacactgcaggctgctacaatttgtgcttcttctcatcagtttctgtctacacattataatctgcataatctgtatggactgacagaggctattgcttctcatagagctctggtgaaggctagaggaacaagaccttttgtgatttctagatctacatttgctggacatggaagatatgctggacattggacaggagatgtatggtcttcttgggagcagctagcttcttctgtgcctgagattctgcagtttaatctgctaggagtgcctctggtgggagctgatgtgtgtggatttctgggaaatacatctgaggagctgtgtgtgagatggacacagctgggagctttttatccttttatgagaaatcataattctctgctgtctctgcctcaggagccttattctttttctgagcctgctcagcaggctatgagaaaggctctgacactgagatatgctctgctgcctcatctgtatacactgtttcatcaggctcatgtggctggagagacagtagctagacctctgtttctggagtttcctaaggattcttctacatggacagttgatcatcagctgctgtggggagaggctctgctgattacacctgtgctgcaggctggaaaggctgaggtgacaggatattttcctctgggaacatggtatgatctgcagacagtgcctatagaggctctgggatctctgcctcctcctcctgctgctcctagagagcctgctattcattctgagggacagtgggtgacactgcctgctcctctggatacaattaatgtgcatctgagagctggatatattattcctctgcagggacctggactgacaacaacagagtctagacagcagcctatggctctggctgtggctctgacaaagggaggagaggctagaggagagctgttttgggatgatggagagtctctggaggtgctggagagaggagcttatacacaggtgatttttctggctagaaataatacaattgtgaatgagctggtgagagtgacatctgagggagctggactgcagctgcagaaggtgacagtgctgggagtggctacagctcctcagcaggtgctgtctaatggagtgcctgtgtctaattttacatattctcctgatacaaaggtgctggatatttgtgtgtctctgctgatgggagagcagtttctggtgtcttggtgttaatgatttaaatctcgagccgggcggagtgtgttagtctctccagagggaggctggttccccagggaagcagagcctgtgtgcgggcagcagctgtgtgcgggcctgggggttgttaagtgcaattatttttaataaaaggggcatttggaaaaaaaaaaaaaaggtagcagtcgacagatgaattctgcagatctgtggcttctagctgcccgggtggcatccctgtgacccctccccagtgcctctcctggccctggaagttgccactccagtgcccaccagccttgtcctaataaaattaagttgcatcattttgtctgactaggtgtccttctataatattatggggtggaggggggtggtatggagcaaggggcaagttgggaagacaacctgtagggcctgcggggtctattgggaaccaagctggagtgcagtggcacaatcttggctcactgcaatctccgcctcctgggttcaagcgattctcctgcctcagcctcccgagttgttgggattccaggcatgcatgaccaggctcagctaatttttgtttttttggtagagacggggtttcaccatattggccaggctggtctccaactcctaatctcaggtgatctacccaccttggcctcccaaattgctgggattacaggcgtgaaccactgctcccttccctgtccttctgattttaaaaaaaagagaaatgttctggcacctgcacttgcactggggacagcctattttgctagtttgttttgtttcgttttgttttgatggagagcgtatgttgtttaaacgcggccgcgtagataagtagcatggcgggttaatcattaactacaaggaacccctagtgatggagttggccactccctctctgcgcgctcgctcgctcactgaggccgggcgaccaaaggtcgcccgacgcccgggctttgcccgggcggcctcagtgagcgagcgagcgcgcagttaattaaggcgccctaggccgacccttagactctgtactcagttctataaacgagccattggatacgagatccgtagattgataagggacacggaatatccccggacgcaatagacaccggtggacagcttggtatcctgagcacagtcgcgcgtccgaatctagctctactttagaggccccggattctgatggtcgtagaccgcagaaccgattggggggatgagatctactagttatcagcacacaattgcccattatacgcgcgtataatggactattgtgtgctgatatagggataacagggtaattctagagctagcatatggatccatcgatttgatgcggtattttctccttacgcatctgtgcggtatttcacaccgcatacgtcaaagcaaccatagtacgcgccctgtagcggcgcattaagcgcggcgggtgtggtggttacgcgcagcgtgaccgctacacttgccagcgccctagcgcccgctcctttcgctttcttcccttcctttctcgccacgttcgccggctttccccgtcaagctctaaatcgggggctccctttagggttccgatttagtgctttacggcacctcgaccccaaaaaacttgatttgggtgatggttcacgtagtgggccatcgccctgatagacggtttttcgccctttgacgttggagtccacgttctttaatagtggactcttgttccaaactggaacaacactcaactctatctcgggctattcttttgatttataagggattttgccgatttcggtctattggttaaaaaatgagctgatttaacaaaaatttaacgcgaattttaacaaaatattaacgtttacaattttatggtgcactctcagtacaatctgctctgatgccgcatagttaagccagccccgacacccgccaacacccgctgacgcgccctgacgggcttgtctgctcccggcatccgcttacagacaagctgtgaccgtctccgggagctgcatgtgtcagaggttttcaccgtcatcaccgaaacgcgcgagacgaaagggcctcgtgatacgcctatttttataggttaatgtcatgataataatggtttcttagacgtcaggtggcacttttcggggaaatgtgcgcggaacccctatttgtttatttttctaaatacattcaaatatgtatccgctcatgagacaataaccctgataaatgcttcaataatattgaaaaaggaagagtatgagccatattcaacgggaaacgtcgaggccgcgattaaattccaacatggatgctgatttatatgggtataaatgggctcgcgataatgtcgggcaatcaggtgcgacaatctatcgcttgtatgggaagcccgatgcgccagagttgtttctgaaacatggcaaaggtagcgttgccaatgatgttacagatgagatggtcagactaaactggctgacggaatttatgcctcttccgaccatcaagcattttatccgtactcctgatgatgcatggttactcaccactgcgatccccggaaaaacagcattccaggtattagaagaatatcctgattcaggtgaaaatattgttgatgcgctggcagtgttcctgcgccggttgcattcgattcctgtttgtaattgtccttttaacagcgatcgcgtatttcgtctcgctcaggcgcaatcacgaatgaataacggtttggttgatgcgagtgattttgatgacgagcgtaatggctggcctgttgaacaagtctggaaagaaatgcataaacttttgccattctcaccggattcagtcgtcactcatggtgatttctcacttgataaccttatttttgacgaggggaaattaataggttgtattgatgttggacgagtcggaatcgcagaccgataccaggatcttgccatcctatggaactgcctcggtgagttttctccttcattacagaaacggctttttcaaaaatatggtattgataatcctgatatgaataaattgcagtttcatttgatgctcgatgagtttttctaagcgtataatggtctagagctagcatatggatccatcgattccattatacgcctgtcagaccaagtttactcatatatactttagattgatttaaaacttcatttttaatttaaaaggatctaggtgaagatcctttttgataatctcatgaccaaaatcccttaacgtgagttttcgttccactgagcgtcagaccccgtagaaaagatcaaaggatcttcttgagatcctttttttctgcgcgtaatctgctgcttgcaaacaaaaaaaccaccgctaccagcggtggtttgtttgccggatcaagagctaccaactctttttccgaaggtaactggcttcagcagagcgcagataccaaatactgttcttctagtgtagccgtagttaggccaccacttcaagaactctgtagcaccgcctacatacctcgctctgctaatcctgttaccagtggctgctgccagtggcgataagtcgtgtcttaccgggttggactcaagacgatagttaccggataaggcgcagcggtcgggctgaacggggggttcgtgcacacagcccagcttggagcgaacgacctacaccgaactgagatacctacagcgtgagctatgagaaagcgccacgcttcccgaagggagaaaggcggacaggtatccggtaagcggcagggtcggaacaggagagcgcacgagggagcttccagggggaaacgcctggtatctttatagtcctgtcgggtttcgccacctctgacttgagcgtcgatttttgtgatgctcgtcaggggggcggagcctatggaaaaacgccagcaacgcggcctttttacggttcctggccttttgctggccttttgctcacatgt

SEQ ID NO: 487 - DNA, 7975 bp, synthetic construct
  source 1..7975: mol_type = other DNA
tctagagctagcatatggatccatcgatttagggataacagggtaattatcagcacacaattgcccattatacgcgcgtataatggactattgtgtgctgatatctgtacacttaagggctagatcttagcttacgtcactagagggtccacgtttagtttttaagatccattgatctcctaaacgctgcaagattcgcaacctggtatacttagcctaggcgctaggtcctagtgcagcgggactttttttctaaagtcgttgagaggaggagtcgtcagaccagatagctttgatgtcctgatcggaaggatcgttggcccccctgcaggcagctgttaattaactgcgcgctcgctcgctcactgaggccgcccgggcaaagcccgggcgtcgggcgacctttggtcgcccggcctcagtgagcgagcgagcgcgcagagagggagtggccaactccatcactaggggttccttgtagttaatgattaacccgccatgctacttatctacggcgcgccacgcgttctaggagttaatttttaaaaagcagtcaaaagtccaagtgcccttgcgagcatttactctctctgtttgctctggttaataatctcaggagcacaaacattccttactagttctaggagttaatttttaaaaagcagtcaaaagtccaagtgcccttgcgagcatttactctctctgtttgctctggttaataatctcaggagcacaaacattccttactagttctagagcggccgccagtgtgctggaattcggcttttttagggctggaagctacctttgacatcatttcctctgcgaatgcatgtataatttctacagaacctattagaaaggatcacccagcctctgcttttgtacaactttcccttaaaaaactgccaatcccactgctgtttggcccaatagtgagaactttttcctgctgcctcttggtgcttttgcctatggcccctattctgcctgctgaagacactcttgccagcatggacttaaacccctccagctctgacaatcctctttctcttttgttttacatgaagggtctggcagccaaagcaatcactcaaagttcaaaccttatcattttttgctttgttcctcttggccttggttttgtacatcagctttgaaaataccatcccagggttaatgctggggttaatttataactgagagtgctctagttctgcaatacaggacatgctataaaaatggaaagatgttgctttctgagagatcaggtggattcttgggcatttgcttaagcttggtaccgccaccatgggggagtttgggctgagctgggtctttctggtggccctgctgaagggagtccagtgtgagcagcagggagcttctagacctggacctagagatgctcaggctcatcctggaagacctagagctgtgcctacacagtgtgatgtgcctcctaattctagatttgattgtgctcctgataaggctataacacaggagcagtgtgaggctagaggatgttgttatattcctgctaagcagggactgcagggagctcagatgggacagccttggtgtttttttcctccttcttatccttcttataagctggagaatctgtcttcttctgagatgggatatacagctacactgacaagaacaacacctacattttttcctaaggatattctgacactgagactggatgtgatgatggagacagagaatagactgcattttacaattaaggatcctgctaatagaagatatgaggtgcctctagagacacctagagtgcattctagagctccttctcctctgtattctgtggagttttctgaggagccttttggagtgattgtgcatagacagctggatggaagagtgctgctgaatacaacagtggctcctctgttttttgctgatcagtttctgcagctgtctacatctctgccttctcagtatattacaggactggctgagcatctgtctcctctgatgctgtctacatcttggacaagaattacactgtggaatagagatctggctcctacacctggagctaatctgtatggatctcatcctttttatctggctctggaggatggaggatctgctcatggagtgtttctgctgaattctaatgctatggatgtagtgctgcagccttctcctgctctgtcttggagatctacaggaggaattctggatgtgtatatttttctaggacctgagcctaagtctgtggtgcagcagtatctggatgtagtgggatatccttttatgcctccttattggggactgggatttcatctgtgtagatggggatattcttctacagctattacaagacaggtggttgagaatatgacaagagctcattttcctctggatgtgcagtggaatgatctagattatatggattctagaagagattttacatttaataaggatggatttagagattttcctgctatggtgcaggagctgcatcagggaggaagaagatatatgatgattgtggatcctgctatttcttcttctggacctgctggatcttatagaccttatgatgagggactgagaagaggagtgtttattacaaatgagacaggacagcctctgattggaaaggtgtggcctggatctacagcttttcctgattttacaaatcctacagctctggcttggtgggaggatatggtggctgagtttcatgatcaggtgccttttgatggaatgtggattgatatgaatgagccttctaattttataagaggatctgaggatggatgtcctaataatgagctagagaatcctccttatgtgcctggagtagtgggaggaacactgcaggctgctacaatttgtgcttcttctcatcagtttctgtctacacattataatctgcataatctgtatggactgacagaggctattgcttctcatagagctctggtgaaggctagaggaacaagaccttttgtgatttctagatctacatttgctggacatggaagatatgctggacattggacaggagatgtatggtcttcttgggagcagctagcttcttctgtgcctgagattctgcagtttaatctgctaggagtgcctctggtgggagctgatgtgtgtggatttctgggaaatacatctgaggagctgtgtgtgagatggacacagctgggagctttttatccttttatgagaaatcataattctctgctgtctctgcctcaggagccttattctttttctgagcctgctcagcaggctatgagaaaggctctgacactgagatatgctctgctgcctcatctgtatacactgtttcatcaggctcatgtggctggagagacagtagctagacctctgtttctggagtttcctaaggattcttctacatggacagttgatcatcagctgctgtggggagaggctctgctgattacacctgtgctgcaggctggaaaggctgaggtgacaggatattttcctctgggaacatggtatgatctgcagacagtgcctatagaggctctgggatctctgcctcctcctcctgctgctcctagagagcctgctattcattctgagggacagtgggtgacactgcctgctcctctggatacaattaatgtgcatctgagagctggatatattattcctctgcagggacctggactgacaacaacagagtctagacagcagcctatggctctggctgtggctctgacaaagggaggagaggctagaggagagctgttttgggatgatggagagtctctggaggtgctggagagaggagcttatacacaggtgatttttctggctagaaataatacaattgtgaatgagctggtgagagtgacatctgagggagctggactgcagctgcagaaggtgacagtgctgggagtggctacagctcctcagcaggtgctgtctaatggagtgcctgtgtctaattttacatattctcctgatacaaaggtgctggatatttgtgtgtctctgctgatgggagagcagtttctggtgtcttggtgttaatgatttaaatctcgagccgggcggagtgtgttagtctctccagagggaggctggttccccagggaagcagagcctgtgtgcgggcagcagctgtgtgcgggcctgggggttgttaagtgcaattatttttaataaaaggggcatttggaaaaaaaaaaaaaaggtagcagtcgacagatgaattctgcagatctgtggcttctagctgcccgggtggcatccctgtgacccctccccagtgcctctcctggccctggaagttgccactccagtgcccaccagccttgtcctaataaaattaagttgcatcattttgtctgactaggtgtccttctataatattatggggtggaggggggtggtatggagcaaggggcaagttgggaagacaacctgtagggcctgcggggtctattgggaaccaagctggagtgcagtggcacaatcttggctcactgcaatctccgcctcctgggttcaagcgattctcctgcctcagcctcccgagttgttgggattccaggcatgcatgaccaggctcagctaatttttgtttttttggtagagacggggtttcaccatattggccaggctggtctccaactcctaatctcaggtgatctacccaccttggcctcccaaattgctgggattacaggcgtgaaccactgctcccttccctgtccttctgattttaaaaaaaagagaaatgttctggcacctgcacttgcactggggacagcctattttgctagtttgttttgtttcgttttgttttgatggagagcgtatgttgtttaaacgcggccgcgtagataagtagcatggcgggttaatcattaactacaaggaacccctagtgatggagttggccactccctctctgcgcgctcgctcgctcactgaggccgggcgaccaaaggtcgcccgacgcccgggctttgcccgggcggcctcagtgagcgagcgagcgcgcagttaattaaggcgccctaggccgacccttagactctgtactcagttctataaacgagccattggatacgagatccgtagattgataagggacacggaatatccccggacgcaatagacaccggtggacagcttggtatcctgagcacagtcgcgcgtccgaatctagctctactttagaggccccggattctgatggtcgtagaccgcagaaccgattggggggatgagatctactagttatcagcacacaattgcccattatacgcgcgtataatggactattgtgtgctgatatagggataacagggtaattctagagctagcatatggatccatcgatttgatgcggtattttctccttacgcatctgtgcggtatttcacaccgcatacgtcaaagcaaccatagtacgcgccctgtagcggcgcattaagcgcggcgggtgtggtggttacgcgcagcgtgaccgctacacttgccagcgccctagcgcccgctcctttcgctttcttcccttcctttctcgccacgttcgccggctttccccgtcaagctctaaatcgggggctccctttagggttccgatttagtgctttacggcacctcgaccccaaaaaacttgatttgggtgatggttcacgtagtgggccatcgccctgatagacggtttttcgccctttgacgttggagtccacgttctttaatagtggactcttgttccaaactggaacaacactcaactctatctcgggctattcttttgatttataagggattttgccgatttcggtctattggttaaaaaatgagctgatttaacaaaaatttaacgcgaattttaacaaaatattaacgtttacaattttatggtgcactctcagtacaatctgctctgatgccgcatagttaagccagccccgacacccgccaacacccgctgacgcgccctgacgggcttgtctgctcccggcatccgcttacagacaagctgtgaccgtctccgggagctgcatgtgtcagaggttttcaccgtcatcaccgaaacgcgcgagacgaaagggcctcgtgatacgcctatttttataggttaatgtcatgataataatggtttcttagacgtcaggtggcacttttcggggaaatgtgcgcggaacccctatttgtttatttttctaaatacattcaaatatgtatccgctcatgagacaataaccctgataaatgcttcaataatattgaaaaaggaagagtatgagccatattcaacgggaaacgtcgaggccgcgattaaattccaacatggatgctgatttatatgggtataaatgggctcgcgataatgtcgggcaatcaggtgcgacaatctatcgcttgtatgggaagcccgatgcgccagagttgtttctgaaacatggcaaaggtagcgttgccaatgatgttacagatgagatggtcagactaaactggctgacggaatttatgcctcttccgaccatcaagcattttatccgtactcctgatgatgcatggttactcaccactgcgatccccggaaaaacagcattccaggtattagaagaatatcctgattcaggtgaaaatattgttgatgcgctggcagtgttcctgcgccggttgcattcgattcctgtttgtaattgtccttttaacagcgatcgcgtatttcgtctcgctcaggcgcaatcacgaatgaataacggtttggttgatgcgagtgattttgatgacgagcgtaatggctggcctgttgaacaagtctggaaagaaatgcataaacttttgccattctcaccggattcagtcgtcactcatggtgatttctcacttgataaccttatttttgacgaggggaaattaataggttgtattgatgttggacgagtcggaatcgcagaccgataccaggatcttgccatcctatggaactgcctcggtgagttttctccttcattacagaaacggctttttcaaaaatatggtattgataatcctgatatgaataaattgcagtttcatttgatgctcgatgagtttttctaagcgtataatggtctagagctagcatatggatccatcgattccattatacgcctgtcagaccaagtttactcatatatactttagattgatttaaaacttcatttttaatttaaaaggatctaggtgaagatcctttttgataatctcatgaccaaaatcccttaacgtgagttttcgttccactgagcgtcagaccccgtagaaaagatcaaaggatcttcttgagatcctttttttctgcgcgtaatctgctgcttgcaaacaaaaaaaccaccgctaccagcggtggtttgtttgccggatcaagagctaccaactctttttccgaaggtaactggcttcagcagagcgcagataccaaatactgttcttctagtgtagccgtagttaggccaccacttcaagaactctgtagcaccgcctacatacctcgctctgctaatcctgttaccagtggctgctgccagtggcgataagtcgtgtcttaccgggttggactcaagacgatagttaccggataaggcgcagcggtcgggctgaacggggggttcgtgcacacagcccagcttggagcgaacgacctacaccgaactgagatacctacagcgtgagctatgagaaagcgccacgcttcccgaagggagaaaggcggacaggtatccggtaagcggcagggtcggaacaggagagcgcacgagggagcttccagggggaaacgcctggtatctttatagtcctgtcgggtttcgccacctctgacttgagcgtcgatttttgtgatgctcgtcaggggggcggagcctatggaaaaacgccagcaacgcggcctttttacggttcctggccttttgctggccttttgctcacatgt

SEQ ID NO: 488 - DNA, 7978 bp, synthetic construct
  source 1..7978: mol_type = other DNA
tctagagctagcatatggatccatcgatttagggataacagggtaattatcagcacacaattgcccattatacgcgcgtataatggactattgtgtgctgatatctgtacacttaagggctagatcttagcttacgtcactagagggtccacgtttagtttttaagatccattgatctcctaaacgctgcaagattcgcaacctggtatacttagcctaggcgctaggtcctagtgcagcgggactttttttctaaagtcgttgagaggaggagtcgtcagaccagatagctttgatgtcctgatcggaaggatcgttggcccccctgcaggcagctgttaattaactgcgcgctcgctcgctcactgaggccgcccgggcaaagcccgggcgtcgggcgacctttggtcgcccggcctcagtgagcgagcgagcgcgcagagagggagtggccaactccatcactaggggttccttgtagttaatgattaacccgccatgctacttatctacggcgcgccacgcgttctaggagttaatttttaaaaagcagtcaaaagtccaagtgcccttgcgagcatttactctctctgtttgctctggttaataatctcaggagcacaaacattccttactagttctaggagttaatttttaaaaagcagtcaaaagtccaagtgcccttgcgagcatttactctctctgtttgctctggttaataatctcaggagcacaaacattccttactagttctagagcggccgccagtgtgctggaattcggcttttttagggctggaagctacctttgacatcatttcctctgcgaatgcatgtataatttctacagaacctattagaaaggatcacccagcctctgcttttgtacaactttcccttaaaaaactgccaatcccactgctgtttggcccaatagtgagaactttttcctgctgcctcttggtgcttttgcctatggcccctattctgcctgctgaagacactcttgccagcatggacttaaacccctccagctctgacaatcctctttctcttttgttttacatgaagggtctggcagccaaagcaatcactcaaagttcaaaccttatcattttttgctttgttcctcttggccttggttttgtacatcagctttgaaaataccatcccagggttaatgctggggttaatttataactgagagtgctctagttctgcaatacaggacatgctataaaaatggaaagatgttgctttctgagagatcaggtggattcttgggcatttgcttaagcttggtaccgccaccatgggggtgaggtacagaatgcagctgctgtcctgcattgcactgtcactggcactggttaccaactcacagcagggggccagcaggccaggccccagggatgcccaggcccaccctggcagacccagggctgtgcccacccagtgtgatgtgcctcccaacagcagatttgactgtgcccctgataaggccattactcaggaacagtgtgaggccaggggctgctgctatatccctgccaagcagggcctgcagggggcccagatggggcagccctggtgcttcttcccccccagctacccctcttataagctggagaatctgagcagctctgaaatgggctacactgccactctgaccaggactacccccaccttcttccccaaggatattctgactctgaggctggatgtgatgatggagactgagaacaggctgcacttcaccatcaaggaccctgccaacaggaggtatgaggtgcccctggaaactcccagggtgcactctagggcccccagccccctgtattctgtggagttctctgaggagccttttggggtcattgtccacaggcagctggatggcagggtgctgctgaatactactgtggcccctctgttctttgctgaccagttcctgcagctgagcaccagcctgccttctcagtacattactggcctggctgagcatctgagccccctgatgctgagcacctcttggaccagaatcaccctgtggaacagggacctggctcccactcctggggccaacctgtatggcagccaccccttctacctggccctggaggatgggggctctgcccatggggtgttcctgctgaacagcaatgccatggatgtggtgctgcagccctctcctgccctgtcttggagatctactgggggcatcctggatgtgtatatcttcctggggcctgagcccaagtctgtggtgcagcagtacctggatgtggtgggctaccccttcatgcccccctactggggcctgggcttccacctgtgcaggtggggctactcttctactgctatcaccaggcaggtggtggagaacatgaccagggctcacttccctctggatgtgcagtggaatgacctggactacatggactctaggagagacttcacttttaataaggatgggttcagggactttcctgccatggtgcaggagctgcatcaggggggcaggagatatatgatgattgtggaccctgctatttctagctctggccctgctggcagctataggccctatgatgaggggctgaggaggggggtgttcatcactaatgagactggccagcccctgattggcaaggtgtggcctggctctactgccttccctgatttcaccaaccccactgccctggcctggtgggaggatatggtggctgagtttcatgaccaggtgccctttgatggcatgtggattgacatgaatgagcccagcaactttatcaggggctctgaagatggctgccccaacaatgagctggagaaccccccctatgtgcctggggtggtggggggcaccctgcaggctgccaccatctgtgccagcagccaccagttcctgagcacccactataacctgcacaacctgtatggcctgactgaggccattgcctctcacagggccctggtgaaggctagggggactaggccctttgtgatcagcaggtctacttttgctggccatggcaggtatgctgggcactggactggggatgtgtggtctagctgggagcagctggccagctctgtgcctgagatcctgcagtttaatctgctgggggtgcccctggtgggggctgatgtgtgtggcttcctgggcaatacctctgaggagctgtgtgtgaggtggactcagctgggggctttctaccccttcatgagaaaccacaactctctgctgagcctgccccaggagccctattctttttctgagcctgcccagcaggctatgaggaaggccctgactctgaggtatgccctgctgccccacctgtataccctgttccatcaggcccatgtggctggggagactgtggccagacctctgttcctggagttccccaaggatagctctacttggactgtggaccaccagctgctgtggggggaggctctgctgatcacccctgtgctgcaggctgggaaggctgaggtgactggctatttccccctgggcacctggtatgatctgcagactgtgcccattgaggccctgggctctctgccccctccccctgctgcccccagggagcctgccatccactctgagggccagtgggtgaccctgcctgcccctctggacactatcaatgtgcacctgagggctggctacatcatccccctgcagggccctggcctgactaccactgagtctaggcagcagcccatggccctggctgtggctctgaccaaggggggggaggccaggggggagctgttctgggatgatggggagtctctggaggtgctggagaggggggcctacacccaggtgatcttcctggctaggaataacaccattgtcaatgagctggtgagggtgacctctgagggggctggcctgcagctgcagaaggtgactgtgctgggggtggctactgccccccagcaggtgctgagcaatggggtgcctgtgagcaacttcacctatagccctgacaccaaggtgctggacatctgtgtgagcctgctgatgggggagcagttcctggtgagctggtgctaatttaaatctcgagccgggcggagtgtgttagtctctccagagggaggctggttccccagggaagcagagcctgtgtgcgggcagcagctgtgtgcgggcctgggggttgttaagtgcaattatttttaataaaaggggcatttggaaaaaaaaaaaaaaggtagcagtcgacagatgaattctgcagatctgtggcttctagctgcccgggtggcatccctgtgacccctccccagtgcctctcctggccctggaagttgccactccagtgcccaccagccttgtcctaataaaattaagttgcatcattttgtctgactaggtgtccttctataatattatggggtggaggggggtggtatggagcaaggggcaagttgggaagacaacctgtagggcctgcggggtctattgggaaccaagctggagtgcagtggcacaatcttggctcactgcaatctccgcctcctgggttcaagcgattctcctgcctcagcctcccgagttgttgggattccaggcatgcatgaccaggctcagctaatttttgtttttttggtagagacggggtttcaccatattggccaggctggtctccaactcctaatctcaggtgatctacccaccttggcctcccaaattgctgggattacaggcgtgaaccactgctcccttccctgtccttctgattttaaaaaaaagagaaatgttctggcacctgcacttgcactggggacagcctattttgctagtttgttttgtttcgttttgttttgatggagagcgtatgttgtttaaacgcggccgcgtagataagtagcatggcgggttaatcattaactacaaggaacccctagtgatggagttggccactccctctctgcgcgctcgctcgctcactgaggccgggcgaccaaaggtcgcccgacgcccgggctttgcccgggcggcctcagtgagcgagcgagcgcgcagttaattaaggcgccctaggccgacccttagactctgtactcagttctataaacgagccattggatacgagatccgtagattgataagggacacggaatatccccggacgcaatagacaccggtggacagcttggtatcctgagcacagtcgcgcgtccgaatctagctctactttagaggccccggattctgatggtcgtagaccgcagaaccgattggggggatgagatctactagttatcagcacacaattgcccattatacgcgcgtataatggactattgtgtgctgatatagggataacagggtaattctagagctagcatatggatccatcgatttgatgcggtattttctccttacgcatctgtgcggtatttcacaccgcatacgtcaaagcaaccatagtacgcgccctgtagcggcgcattaagcgcggcgggtgtggtggttacgcgcagcgtgaccgctacacttgccagcgccctagcgcccgctcctttcgctttcttcccttcctttctcgccacgttcgccggctttccccgtcaagctctaaatcgggggctccctttagggttccgatttagtgctttacggcacctcgaccccaaaaaacttgatttgggtgatggttcacgtagtgggccatcgccctgatagacggtttttcgccctttgacgttggagtccacgttctttaatagtggactcttgttccaaactggaacaacactcaactctatctcgggctattcttttgatttataagggattttgccgatttcggtctattggttaaaaaatgagctgatttaacaaaaatttaacgcgaattttaacaaaatattaacgtttacaattttatggtgcactctcagtacaatctgctctgatgccgcatagttaagccagccccgacacccgccaacacccgctgacgcgccctgacgggcttgtctgctcccggcatccgcttacagacaagctgtgaccgtctccgggagctgcatgtgtcagaggttttcaccgtcatcaccgaaacgcgcgagacgaaagggcctcgtgatacgcctatttttataggttaatgtcatgataataatggtttcttagacgtcaggtggcacttttcggggaaatgtgcgcggaacccctatttgtttatttttctaaatacattcaaatatgtatccgctcatgagacaataaccctgataaatgcttcaataatattgaaaaaggaagagtatgagccatattcaacgggaaacgtcgaggccgcgattaaattccaacatggatgctgatttatatgggtataaatgggctcgcgataatgtcgggcaatcaggtgcgacaatctatcgcttgtatgggaagcccgatgcgccagagttgtttctgaaacatggcaaaggtagcgttgccaatgatgttacagatgagatggtcagactaaactggctgacggaatttatgcctcttccgaccatcaagcattttatccgtactcctgatgatgcatggttactcaccactgcgatccccggaaaaacagcattccaggtattagaagaatatcctgattcaggtgaaaatattgttgatgcgctggcagtgttcctgcgccggttgcattcgattcctgtttgtaattgtccttttaacagcgatcgcgtatttcgtctcgctcaggcgcaatcacgaatgaataacggtttggttgatgcgagtgattttgatgacgagcgtaatggctggcctgttgaacaagtctggaaagaaatgcataaacttttgccattctcaccggattcagtcgtcactcatggtgatttctcacttgataaccttatttttgacgaggggaaattaataggttgtattgatgttggacgagtcggaatcgcagaccgataccaggatcttgccatcctatggaactgcctcggtgagttttctccttcattacagaaacggctttttcaaaaatatggtattgataatcctgatatgaataaattgcagtttcatttgatgctcgatgagtttttctaagcgtataatggtctagagctagcatatggatccatcgattccattatacgcctgtcagaccaagtttactcatatatactttagattgatttaaaacttcatttttaatttaaaaggatctaggtgaagatcctttttgataatctcatgaccaaaatcccttaacgtgagttttcgttccactgagcgtcagaccccgtagaaaagatcaaaggatcttcttgagatcctttttttctgcgcgtaatctgctgcttgcaaacaaaaaaaccaccgctaccagcggtggtttgtttgccggatcaagagctaccaactctttttccgaaggtaactggcttcagcagagcgcagataccaaatactgttcttctagtgtagccgtagttaggccaccacttcaagaactctgtagcaccgcctacatacctcgctctgctaatcctgttaccagtggctgctgccagtggcgataagtcgtgtcttaccgggttggactcaagacgatagttaccggataaggcgcagcggtcgggctgaacggggggttcgtgcacacagcccagcttggagcgaacgacctacaccgaactgagatacctacagcgtgagctatgagaaagcgccacgcttcccgaagggagaaaggcggacaggtatccggtaagcggcagggtcggaacaggagagcgcacgagggagcttccagggggaaacgcctggtatctttatagtcctgtcgggtttcgccacctctgacttgagcgtcgatttttgtgatgctcgtcaggggggcggagcctatggaaaaacgccagcaacgcggcctttttacggttcctggccttttgctggccttttgctcacatgt

SEQ ID NO: 489 - DNA, 7978 bp, synthetic construct
  source 1..7978: mol_type = other DNA
tctagagctagcatatggatccatcgatttagggataacagggtaattatcagcacacaattgcccattatacgcgcgtataatggactattgtgtgctgatatctgtacacttaagggctagatcttagcttacgtcactagagggtccacgtttagtttttaagatccattgatctcctaaacgctgcaagattcgcaacctggtatacttagcctaggcgctaggtcctagtgcagcgggactttttttctaaagtcgttgagaggaggagtcgtcagaccagatagctttgatgtcctgatcggaaggatcgttggcccccctgcaggcagctgttaattaactgcgcgctcgctcgctcactgaggccgcccgggcaaagcccgggcgtcgggcgacctttggtcgcccggcctcagtgagcgagcgagcgcgcagagagggagtggccaactccatcactaggggttccttgtagttaatgattaacccgccatgctacttatctacggcgcgccacgcgttctaggagttaatttttaaaaagcagtcaaaagtccaagtgcccttgcgagcatttactctctctgtttgctctggttaataatctcaggagcacaaacattccttactagttctaggagttaatttttaaaaagcagtcaaaagtccaagtgcccttgcgagcatttactctctctgtttgctctggttaataatctcaggagcacaaacattccttactagttctagagcggccgccagtgtgctggaattcggcttttttagggctggaagctacctttgacatcatttcctctgcgaatgcatgtataatttctacagaacctattagaaaggatcacccagcctctgcttttgtacaactttcccttaaaaaactgccaatcccactgctgtttggcccaatagtgagaactttttcctgctgcctcttggtgcttttgcctatggcccctattctgcctgctgaagacactcttgccagcatggacttaaacccctccagctctgacaatcctctttctcttttgttttacatgaagggtctggcagccaaagcaatcactcaaagttcaaaccttatcattttttgctttgttcctcttggccttggttttgtacatcagctttgaaaataccatcccagggttaatgctggggttaatttataactgagagtgctctagttctgcaatacaggacatgctataaaaatggaaagatgttgctttctgagagatcaggtggattcttgggcatttgcttaagcttggtaccgccaccatgggggtgagggagtttgggctgagctgggtctttctggtggccctgctgaagggagtccagtgtgagcagcagggggccagcaggccaggccccagggatgcccaggcccaccctggcagacccagggctgtgcccacccagtgtgatgtgcctcccaacagcagatttgactgtgcccctgataaggccattactcaggaacagtgtgaggccaggggctgctgctatatccctgccaagcagggcctgcagggggcccagatggggcagccctggtgcttcttcccccccagctacccctcttataagctggagaatctgagcagctctgaaatgggctacactgccactctgaccaggactacccccaccttcttccccaaggatattctgactctgaggctggatgtgatgatggagactgagaacaggctgcacttcaccatcaaggaccctgccaacaggaggtatgaggtgcccctggaaactcccagggtgcactctagggcccccagccccctgtattctgtggagttctctgaggagccttttggggtcattgtccacaggcagctggatggcagggtgctgctgaatactactgtggcccctctgttctttgctgaccagttcctgcagctgagcaccagcctgccttctcagtacattactggcctggctgagcatctgagccccctgatgctgagcacctcttggaccagaatcaccctgtggaacagggacctggctcccactcctggggccaacctgtatggcagccaccccttctacctggccctggaggatgggggctctgcccatggggtgttcctgctgaacagcaatgccatggatgtggtgctgcagccctctcctgccctgtcttggagatctactgggggcatcctggatgtgtatatcttcctggggcctgagcccaagtctgtggtgcagcagtacctggatgtggtgggctaccccttcatgcccccctactggggcctgggcttccacctgtgcaggtggggctactcttctactgctatcaccaggcaggtggtggagaacatgaccagggctcacttccctctggatgtgcagtggaatgacctggactacatggactctaggagagacttcacttttaataaggatgggttcagggactttcctgccatggtgcaggagctgcatcaggggggcaggagatatatgatgattgtggaccctgctatttctagctctggccctgctggcagctataggccctatgatgaggggctgaggaggggggtgttcatcactaatgagactggccagcccctgattggcaaggtgtggcctggctctactgccttccctgatttcaccaaccccactgccctggcctggtgggaggatatggtggctgagtttcatgaccaggtgccctttgatggcatgtggattgacatgaatgagcccagcaactttatcaggggctctgaagatggctgccccaacaatgagctggagaaccccccctatgtgcctggggtggtggggggcaccctgcaggctgccaccatctgtgccagcagccaccagttcctgagcacccactataacctgcacaacctgtatggcctgactgaggccattgcctctcacagggccctggtgaaggctagggggactaggccctttgtgatcagcaggtctacttttgctggccatggcaggtatgctgggcactggactggggatgtgtggtctagctgggagcagctggccagctctgtgcctgagatcctgcagtttaatctgctgggggtgcccctggtgggggctgatgtgtgtggcttcctgggcaatacctctgaggagctgtgtgtgaggtggactcagctgggggctttctaccccttcatgagaaaccacaactctctgctgagcctgccccaggagccctattctttttctgagcctgcccagcaggctatgaggaaggccctgactctgaggtatgccctgctgccccacctgtataccctgttccatcaggcccatgtggctggggagactgtggccagacctctgttcctggagttccccaaggatagctctacttggactgtggaccaccagctgctgtggggggaggctctgctgatcacccctgtgctgcaggctgggaaggctgaggtgactggctatttccccctgggcacctggtatgatctgcagactgtgcccattgaggccctgggctctctgccccctccccctgctgcccccagggagcctgccatccactctgagggccagtgggtgaccctgcctgcccctctggacactatcaatgtgcacctgagggctggctacatcatccccctgcagggccctggcctgactaccactgagtctaggcagcagcccatggccctggctgtggctctgaccaaggggggggaggccaggggggagctgttctgggatgatggggagtctctggaggtgctggagaggggggcctacacccaggtgatcttcctggctaggaataacaccattgtcaatgagctggtgagggtgacctctgagggggctggcctgcagctgcagaaggtgactgtgctgggggtggctactgccccccagcaggtgctgagcaatggggtgcctgtgagcaacttcacctatagccctgacaccaaggtgctggacatctgtgtgagcctgctgatgggggagcagttcctggtgagctggtgctaatttaaatctcgagccgggcggagtgtgttagtctctccagagggaggctggttccccagggaagcagagcctgtgtgcgggcagcagctgtgtgcgggcctgggggttgttaagtgcaattatttttaataaaaggggcatttggaaaaaaaaaaaaaaggtagcagtcgacagatgaattctgcagatctgtggcttctagctgcccgggtggcatccctgtgacccctccccagtgcctctcctggccctggaagttgccactccagtgcccaccagccttgtcctaataaaattaagttgcatcattttgtctgactaggtgtccttctataatattatggggtggaggggggtggtatggagcaaggggcaagttgggaagacaacctgtagggcctgcggggtctattgggaaccaagctggagtgcagtggcacaatcttggctcactgcaatctccgcctcctgggttcaagcgattctcctgcctcagcctcccgagttgttgggattccaggcatgcatgaccaggctcagctaatttttgtttttttggtagagacggggtttcaccatattggccaggctggtctccaactcctaatctcaggtgatctacccaccttggcctcccaaattgctgggattacaggcgtgaaccactgctcccttccctgtccttctgattttaaaaaaaagagaaatgttctggcacctgcacttgcactggggacagcctattttgctagtttgttttgtttcgttttgttttgatggagagcgtatgttgtttaaacgcggccgcgtagataagtagcatggcgggttaatcattaactacaaggaacccctagtgatggagttggccactccctctctgcgcgctcgctcgctcactgaggccgggcgaccaaaggtcgcccgacgcccgggctttgcccgggcggcctcagtgagcgagcgagcgcgcagttaattaaggcgccctaggccgacccttagactctgtactcagttctataaacgagccattggatacgagatccgtagattgataagggacacggaatatccccggacgcaatagacaccggtggacagcttggtatcctgagcacagtcgcgcgtccgaatctagctctactttagaggccccggattctgatggtcgtagaccgcagaaccgattggggggatgagatctactagttatcagcacacaattgcccattatacgcgcgtataatggactattgtgtgctgatatagggataacagggtaattctagagctagcatatggatccatcgatttgatgcggtattttctccttacgcatctgtgcggtatttcacaccgcatacgtcaaagcaaccatagtacgcgccctgtagcggcgcattaagcgcggcgggtgtggtggttacgcgcagcgtgaccgctacacttgccagcgccctagcgcccgctcctttcgctttcttcccttcctttctcgccacgttcgccggctttccccgtcaagctctaaatcgggggctccctttagggttccgatttagtgctttacggcacctcgaccccaaaaaacttgatttgggtgatggttcacgtagtgggccatcgccctgatagacggtttttcgccctttgacgttggagtccacgttctttaatagtggactcttgttccaaactggaacaacactcaactctatctcgggctattcttttgatttataagggattttgccgatttcggtctattggttaaaaaatgagctgatttaacaaaaatttaacgcgaattttaacaaaatattaacgtttacaattttatggtgcactctcagtacaatctgctctgatgccgcatagttaagccagccccgacacccgccaacacccgctgacgcgccctgacgggcttgtctgctcccggcatccgcttacagacaagctgtgaccgtctccgggagctgcatgtgtcagaggttttcaccgtcatcaccgaaacgcgcgagacgaaagggcctcgtgatacgcctatttttataggttaatgtcatgataataatggtttcttagacgtcaggtggcacttttcggggaaatgtgcgcggaacccctatttgtttatttttctaaatacattcaaatatgtatccgctcatgagacaataaccctgataaatgcttcaataatattgaaaaaggaagagtatgagccatattcaacgggaaacgtcgaggccgcgattaaattccaacatggatgctgatttatatgggtataaatgggctcgcgataatgtcgggcaatcaggtgcgacaatctatcgcttgtatgggaagcccgatgcgccagagttgtttctgaaacatggcaaaggtagcgttgccaatgatgttacagatgagatggtcagactaaactggctgacggaatttatgcctcttccgaccatcaagcattttatccgtactcctgatgatgcatggttactcaccactgcgatccccggaaaaacagcattccaggtattagaagaatatcctgattcaggtgaaaatattgttgatgcgctggcagtgttcctgcgccggttgcattcgattcctgtttgtaattgtccttttaacagcgatcgcgtatttcgtctcgctcaggcgcaatcacgaatgaataacggtttggttgatgcgagtgattttgatgacgagcgtaatggctggcctgttgaacaagtctggaaagaaatgcataaacttttgccattctcaccggattcagtcgtcactcatggtgatttctcacttgataaccttatttttgacgaggggaaattaataggttgtattgatgttggacgagtcggaatcgcagaccgataccaggatcttgccatcctatggaactgcctcggtgagttttctccttcattacagaaacggctttttcaaaaatatggtattgataatcctgatatgaataaattgcagtttcatttgatgctcgatgagtttttctaagcgtataatggtctagagctagcatatggatccatcgattccattatacgcctgtcagaccaagtttactcatatatactttagattgatttaaaacttcatttttaatttaaaaggatctaggtgaagatcctttttgataatctcatgaccaaaatcccttaacgtgagttttcgttccactgagcgtcagaccccgtagaaaagatcaaaggatcttcttgagatcctttttttctgcgcgtaatctgctgcttgcaaacaaaaaaaccaccgctaccagcggtggtttgtttgccggatcaagagctaccaactctttttccgaaggtaactggcttcagcagagcgcagataccaaatactgttcttctagtgtagccgtagttaggccaccacttcaagaactctgtagcaccgcctacatacctcgctctgctaatcctgttaccagtggctgctgccagtggcgataagtcgtgtcttaccgggttggactcaagacgatagttaccggataaggcgcagcggtcgggctgaacggggggttcgtgcacacagcccagcttggagcgaacgacctacaccgaactgagatacctacagcgtgagctatgagaaagcgccacgcttcccgaagggagaaaggcggacaggtatccggtaagcggcagggtcggaacaggagagcgcacgagggagcttccagggggaaacgcctggtatctttatagtcctgtcgggtttcgccacctctgacttgagcgtcgatttttgtgatgctcgtcaggggggcggagcctatggaaaaacgccagcaacgcggcctttttacggttcctggccttttgctggccttttgctcacatgt

SEQ ID NO: 490 - DNA, 7981 bp, synthetic construct
  source 1..7981: mol_type = other DNA
tctagagctagcatatggatccatcgatttagggataacagggtaattatcagcacacaattgcccattatacgcgcgtataatggactattgtgtgctgatatctgtacacttaagggctagatcttagcttacgtcactagagggtccacgtttagtttttaagatccattgatctcctaaacgctgcaagattcgcaacctggtatacttagcctaggcgctaggtcctagtgcagcgggactttttttctaaagtcgttgagaggaggagtcgtcagaccagatagctttgatgtcctgatcggaaggatcgttggcccccctgcaggcagctgttaattaactgcgcgctcgctcgctcactgaggccgcccgggcaaagcccgggcgtcgggcgacctttggtcgcccggcctcagtgagcgagcgagcgcgcagagagggagtggccaactccatcactaggggttccttgtagttaatgattaacccgccatgctacttatctacggcgcgccacgcgttctaggagttaatttttaaaaagcagtcaaaagtccaagtgcccttgcgagcatttactctctctgtttgctctggttaataatctcaggagcacaaacattccttactagttctaggagttaatttttaaaaagcagtcaaaagtccaagtgcccttgcgagcatttactctctctgtttgctctggttaataatctcaggagcacaaacattccttactagttctagagcggccgccagtgtgctggaattcggcttttttagggctggaagctacctttgacatcatttcctctgcgaatgcatgtataatttctacagaacctattagaaaggatcacccagcctctgcttttgtacaactttcccttaaaaaactgccaatcccactgctgtttggcccaatagtgagaactttttcctgctgcctcttggtgcttttgcctatggcccctattctgcctgctgaagacactcttgccagcatggacttaaacccctccagctctgacaatcctctttctcttttgttttacatgaagggtctggcagccaaagcaatcactcaaagttcaaaccttatcattttttgctttgttcctcttggccttggttttgtacatcagctttgaaaataccatcccagggttaatgctggggttaatttataactgagagtgctctagttctgcaatacaggacatgctataaaaatggaaagatgttgctttctgagagatcaggtggattcttgggcatttgcttaagcttggtaccgccaccatgggggtgaggtacagaatgcagctgctgtcctgcattgcactgtcactggcactggttaccaactcacagcagggagcttctagacctggacctagagatgctcaggctcatcctggaagacctagagctgtgcctacacagtgtgatgtgcctcctaattctagatttgattgtgctcctgataaggctataacacaggagcagtgtgaggctagaggatgttgttatattcctgctaagcagggactgcagggagctcagatgggacagccttggtgtttttttcctccttcttatccttcttataagctggagaatctgtcttcttctgagatgggatatacagctacactgacaagaacaacacctacattttttcctaaggatattctgacactgagactggatgtgatgatggagacagagaatagactgcattttacaattaaggatcctgctaatagaagatatgaggtgcctctagagacacctagagtgcattctagagctccttctcctctgtattctgtggagttttctgaggagccttttggagtgattgtgcatagacagctggatggaagagtgctgctgaatacaacagtggctcctctgttttttgctgatcagtttctgcagctgtctacatctctgccttctcagtatattacaggactggctgagcatctgtctcctctgatgctgtctacatcttggacaagaattacactgtggaatagagatctggctcctacacctggagctaatctgtatggatctcatcctttttatctggctctggaggatggaggatctgctcatggagtgtttctgctgaattctaatgctatggatgtagtgctgcagccttctcctgctctgtcttggagatctacaggaggaattctggatgtgtatatttttctaggacctgagcctaagtctgtggtgcagcagtatctggatgtagtgggatatccttttatgcctccttattggggactgggatttcatctgtgtagatggggatattcttctacagctattacaagacaggtggttgagaatatgacaagagctcattttcctctggatgtgcagtggaatgatctagattatatggattctagaagagattttacatttaataaggatggatttagagattttcctgctatggtgcaggagctgcatcagggaggaagaagatatatgatgattgtggatcctgctatttcttcttctggacctgctggatcttatagaccttatgatgagggactgagaagaggagtgtttattacaaatgagacaggacagcctctgattggaaaggtgtggcctggatctacagcttttcctgattttacaaatcctacagctctggcttggtgggaggatatggtggctgagtttcatgatcaggtgccttttgatggaatgtggattgatatgaatgagccttctaattttataagaggatctgaggatggatgtcctaataatgagctagagaatcctccttatgtgcctggagtagtgggaggaacactgcaggctgctacaatttgtgcttcttctcatcagtttctgtctacacattataatctgcataatctgtatggactgacagaggctattgcttctcatagagctctggtgaaggctagaggaacaagaccttttgtgatttctagatctacatttgctggacatggaagatatgctggacattggacaggagatgtatggtcttcttgggagcagctagcttcttctgtgcctgagattctgcagtttaatctgctaggagtgcctctggtgggagctgatgtgtgtggatttctgggaaatacatctgaggagctgtgtgtgagatggacacagctgggagctttttatccttttatgagaaatcataattctctgctgtctctgcctcaggagccttattctttttctgagcctgctcagcaggctatgagaaaggctctgacactgagatatgctctgctgcctcatctgtatacactgtttcatcaggctcatgtggctggagagacagtagctagacctctgtttctggagtttcctaaggattcttctacatggacagttgatcatcagctgctgtggggagaggctctgctgattacacctgtgctgcaggctggaaaggctgaggtgacaggatattttcctctgggaacatggtatgatctgcagacagtgcctatagaggctctgggatctctgcctcctcctcctgctgctcctagagagcctgctattcattctgagggacagtgggtgacactgcctgctcctctggatacaattaatgtgcatctgagagctggatatattattcctctgcagggacctggactgacaacaacagagtctagacagcagcctatggctctggctgtggctctgacaaagggaggagaggctagaggagagctgttttgggatgatggagagtctctggaggtgctggagagaggagcttatacacaggtgatttttctggctagaaataatacaattgtgaatgagctggtgagagtgacatctgagggagctggactgcagctgcagaaggtgacagtgctgggagtggctacagctcctcagcaggtgctgtctaatggagtgcctgtgtctaattttacatattctcctgatacaaaggtgctggatatttgtgtgtctctgctgatgggagagcagtttctggtgtcttggtgttaatgatttaaatctcgagccgggcggagtgtgttagtctctccagagggaggctggttccccagggaagcagagcctgtgtgcgggcagcagctgtgtgcgggcctgggggttgttaagtgcaattatttttaataaaaggggcatttggaaaaaaaaaaaaaaggtagcagtcgacagatgaattctgcagatctgtggcttctagctgcccgggtggcatccctgtgacccctccccagtgcctctcctggccctggaagttgccactccagtgcccaccagccttgtcctaataaaattaagttgcatcattttgtctgactaggtgtccttctataatattatggggtggaggggggtggtatggagcaaggggcaagttgggaagacaacctgtagggcctgcggggtctattgggaaccaagctggagtgcagtggcacaatcttggctcactgcaatctccgcctcctgggttcaagcgattctcctgcctcagcctcccgagttgttgggattccaggcatgcatgaccaggctcagctaatttttgtttttttggtagagacggggtttcaccatattggccaggctggtctccaactcctaatctcaggtgatctacccaccttggcctcccaaattgctgggattacaggcgtgaaccactgctcccttccctgtccttctgattttaaaaaaaagagaaatgttctggcacctgcacttgcactggggacagcctattttgctagtttgttttgtttcgttttgttttgatggagagcgtatgttgtttaaacgcggccgcgtagataagtagcatggcgggttaatcattaactacaaggaacccctagtgatggagttggccactccctctctgcgcgctcgctcgctcactgaggccgggcgaccaaaggtcgcccgacgcccgggctttgcccgggcggcctcagtgagcgagcgagcgcgcagttaattaaggcgccctaggccgacccttagactctgtactcagttctataaacgagccattggatacgagatccgtagattgataagggacacggaatatccccggacgcaatagacaccggtggacagcttggtatcctgagcacagtcgcgcgtccgaatctagctctactttagaggccccggattctgatggtcgtagaccgcagaaccgattggggggatgagatctactagttatcagcacacaattgcccattatacgcgcgtataatggactattgtgtgctgatatagggataacagggtaattctagagctagcatatggatccatcgatttgatgcggtattttctccttacgcatctgtgcggtatttcacaccgcatacgtcaaagcaaccatagtacgcgccctgtagcggcgcattaagcgcggcgggtgtggtggttacgcgcagcgtgaccgctacacttgccagcgccctagcgcccgctcctttcgctttcttcccttcctttctcgccacgttcgccggctttccccgtcaagctctaaatcgggggctccctttagggttccgatttagtgctttacggcacctcgaccccaaaaaacttgatttgggtgatggttcacgtagtgggccatcgccctgatagacggtttttcgccctttgacgttggagtccacgttctttaatagtggactcttgttccaaactggaacaacactcaactctatctcgggctattcttttgatttataagggattttgccgatttcggtctattggttaaaaaatgagctgatttaacaaaaatttaacgcgaattttaacaaaatattaacgtttacaattttatggtgcactctcagtacaatctgctctgatgccgcatagttaagccagccccgacacccgccaacacccgctgacgcgccctgacgggcttgtctgctcccggcatccgcttacagacaagctgtgaccgtctccgggagctgcatgtgtcagaggttttcaccgtcatcaccgaaacgcgcgagacgaaagggcctcgtgatacgcctatttttataggttaatgtcatgataataatggtttcttagacgtcaggtggcacttttcggggaaatgtgcgcggaacccctatttgtttatttttctaaatacattcaaatatgtatccgctcatgagacaataaccctgataaatgcttcaataatattgaaaaaggaagagtatgagccatattcaacgggaaacgtcgaggccgcgattaaattccaacatggatgctgatttatatgggtataaatgggctcgcgataatgtcgggcaatcaggtgcgacaatctatcgcttgtatgggaagcccgatgcgccagagttgtttctgaaacatggcaaaggtagcgttgccaatgatgttacagatgagatggtcagactaaactggctgacggaatttatgcctcttccgaccatcaagcattttatccgtactcctgatgatgcatggttactcaccactgcgatccccggaaaaacagcattccaggtattagaagaatatcctgattcaggtgaaaatattgttgatgcgctggcagtgttcctgcgccggttgcattcgattcctgtttgtaattgtccttttaacagcgatcgcgtatttcgtctcgctcaggcgcaatcacgaatgaataacggtttggttgatgcgagtgattttgatgacgagcgtaatggctggcctgttgaacaagtctggaaagaaatgcataaacttttgccattctcaccggattcagtcgtcactcatggtgatttctcacttgataaccttatttttgacgaggggaaattaataggttgtattgatgttggacgagtcggaatcgcagaccgataccaggatcttgccatcctatggaactgcctcggtgagttttctccttcattacagaaacggctttttcaaaaatatggtattgataatcctgatatgaataaattgcagtttcatttgatgctcgatgagtttttctaagcgtataatggtctagagctagcatatggatccatcgattccattatacgcctgtcagaccaagtttactcatatatactttagattgatttaaaacttcatttttaatttaaaaggatctaggtgaagatcctttttgataatctcatgaccaaaatcccttaacgtgagttttcgttccactgagcgtcagaccccgtagaaaagatcaaaggatcttcttgagatcctttttttctgcgcgtaatctgctgcttgcaaacaaaaaaaccaccgctaccagcggtggtttgtttgccggatcaagagctaccaactctttttccgaaggtaactggcttcagcagagcgcagataccaaatactgttcttctagtgtagccgtagttaggccaccacttcaagaactctgtagcaccgcctacatacctcgctctgctaatcctgttaccagtggctgctgccagtggcgataagtcgtgtcttaccgggttggactcaagacgatagttaccggataaggcgcagcggtcgggctgaacggggggttcgtgcacacagcccagcttggagcgaacgacctacaccgaactgagatacctacagcgtgagctatgagaaagcgccacgcttcccgaagggagaaaggcggacaggtatccggtaagcggcagggtcggaacaggagagcgcacgagggagcttccagggggaaacgcctggtatctttatagtcctgtcgggtttcgccacctctgacttgagcgtcgatttttgtgatgctcgtcaggggggcggagcctatggaaaaacgccagcaacgcggcctttttacggttcctggccttttgctggccttttgctcacatgt

SEQ ID NO: 491 - DNA, 7981 bp, synthetic construct
  source 1..7981: mol_type = other DNA
tctagagctagcatatggatccatcgatttagggataacagggtaattatcagcacacaattgcccattatacgcgcgtataatggactattgtgtgctgatatctgtacacttaagggctagatcttagcttacgtcactagagggtccacgtttagtttttaagatccattgatctcctaaacgctgcaagattcgcaacctggtatacttagcctaggcgctaggtcctagtgcagcgggactttttttctaaagtcgttgagaggaggagtcgtcagaccagatagctttgatgtcctgatcggaaggatcgttggcccccctgcaggcagctgttaattaactgcgcgctcgctcgctcactgaggccgcccgggcaaagcccgggcgtcgggcgacctttggtcgcccggcctcagtgagcgagcgagcgcgcagagagggagtggccaactccatcactaggggttccttgtagttaatgattaacccgccatgctacttatctacggcgcgccacgcgttctaggagttaatttttaaaaagcagtcaaaagtccaagtgcccttgcgagcatttactctctctgtttgctctggttaataatctcaggagcacaaacattccttactagttctaggagttaatttttaaaaagcagtcaaaagtccaagtgcccttgcgagcatttactctctctgtttgctctggttaataatctcaggagcacaaacattccttactagttctagagcggccgccagtgtgctggaattcggcttttttagggctggaagctacctttgacatcatttcctctgcgaatgcatgtataatttctacagaacctattagaaaggatcacccagcctctgcttttgtacaactttcccttaaaaaactgccaatcccactgctgtttggcccaatagtgagaactttttcctgctgcctcttggtgcttttgcctatggcccctattctgcctgctgaagacactcttgccagcatggacttaaacccctccagctctgacaatcctctttctcttttgttttacatgaagggtctggcagccaaagcaatcactcaaagttcaaaccttatcattttttgctttgttcctcttggccttggttttgtacatcagctttgaaaataccatcccagggttaatgctggggttaatttataactgagagtgctctagttctgcaatacaggacatgctataaaaatggaaagatgttgctttctgagagatcaggtggattcttgggcatttgcttaagcttggtaccgccaccatgggggtgagggagtttgggctgagctgggtctttctggtggccctgctgaagggagtccagtgtgagcagcagggagcttctagacctggacctagagatgctcaggctcatcctggaagacctagagctgtgcctacacagtgtgatgtgcctcctaattctagatttgattgtgctcctgataaggctataacacaggagcagtgtgaggctagaggatgttgttatattcctgctaagcagggactgcagggagctcagatgggacagccttggtgtttttttcctccttcttatccttcttataagctggagaatctgtcttcttctgagatgggatatacagctacactgacaagaacaacacctacattttttcctaaggatattctgacactgagactggatgtgatgatggagacagagaatagactgcattttacaattaaggatcctgctaatagaagatatgaggtgcctctagagacacctagagtgcattctagagctccttctcctctgtattctgtggagttttctgaggagccttttggagtgattgtgcatagacagctggatggaagagtgctgctgaatacaacagtggctcctctgttttttgctgatcagtttctgcagctgtctacatctctgccttctcagtatattacaggactggctgagcatctgtctcctctgatgctgtctacatcttggacaagaattacactgtggaatagagatctggctcctacacctggagctaatctgtatggatctcatcctttttatctggctctggaggatggaggatctgctcatggagtgtttctgctgaattctaatgctatggatgtagtgctgcagccttctcctgctctgtcttggagatctacaggaggaattctggatgtgtatatttttctaggacctgagcctaagtctgtggtgcagcagtatctggatgtagtgggatatccttttatgcctccttattggggactgggatttcatctgtgtagatggggatattcttctacagctattacaagacaggtggttgagaatatgacaagagctcattttcctctggatgtgcagtggaatgatctagattatatggattctagaagagattttacatttaataaggatggatttagagattttcctgctatggtgcaggagctgcatcagggaggaagaagatatatgatgattgtggatcctgctatttcttcttctggacctgctggatcttatagaccttatgatgagggactgagaagaggagtgtttattacaaatgagacaggacagcctctgattggaaaggtgtggcctggatctacagcttttcctgattttacaaatcctacagctctggcttggtgggaggatatggtggctgagtttcatgatcaggtgccttttgatggaatgtggattgatatgaatgagccttctaattttataagaggatctgaggatggatgtcctaataatgagctagagaatcctccttatgtgcctggagtagtgggaggaacactgcaggctgctacaatttgtgcttcttctcatcagtttctgtctacacattataatctgcataatctgtatggactgacagaggctattgcttctcatagagctctggtgaaggctagaggaacaagaccttttgtgatttctagatctacatttgctggacatggaagatatgctggacattggacaggagatgtatggtcttcttgggagcagctagcttcttctgtgcctgagattctgcagtttaatctgctaggagtgcctctggtgggagctgatgtgtgtggatttctgggaaatacatctgaggagctgtgtgtgagatggacacagctgggagctttttatccttttatgagaaatcataattctctgctgtctctgcctcaggagccttattctttttctgagcctgctcagcaggctatgagaaaggctctgacactgagatatgctctgctgcctcatctgtatacactgtttcatcaggctcatgtggctggagagacagtagctagacctctgtttctggagtttcctaaggattcttctacatggacagttgatcatcagctgctgtggggagaggctctgctgattacacctgtgctgcaggctggaaaggctgaggtgacaggatattttcctctgggaacatggtatgatctgcagacagtgcctatagaggctctgggatctctgcctcctcctcctgctgctcctagagagcctgctattcattctgagggacagtgggtgacactgcctgctcctctggatacaattaatgtgcatctgagagctggatatattattcctctgcagggacctggactgacaacaacagagtctagacagcagcctatggctctggctgtggctctgacaaagggaggagaggctagaggagagctgttttgggatgatggagagtctctggaggtgctggagagaggagcttatacacaggtgatttttctggctagaaataatacaattgtgaatgagctggtgagagtgacatctgagggagctggactgcagctgcagaaggtgacagtgctgggagtggctacagctcctcagcaggtgctgtctaatggagtgcctgtgtctaattttacatattctcctgatacaaaggtgctggatatttgtgtgtctctgctgatgggagagcagtttctggtgtcttggtgttaatgatttaaatctcgagccgggcggagtgtgttagtctctccagagggaggctggttccccagggaagcagagcctgtgtgcgggcagcagctgtgtgcgggcctgggggttgttaagtgcaattatttttaataaaaggggcatttggaaaaaaaaaaaaaaggtagcagtcgacagatgaattctgcagatctgtggcttctagctgcccgggtggcatccctgtgacccctccccagtgcctctcctggccctggaagttgccactccagtgcccaccagccttgtcctaataaaattaagttgcatcattttgtctgactaggtgtccttctataatattatggggtggaggggggtggtatggagcaaggggcaagttgggaagacaacctgtagggcctgcggggtctattgggaaccaagctggagtgcagtggcacaatcttggctcactgcaatctccgcctcctgggttcaagcgattctcctgcctcagcctcccgagttgttgggattccaggcatgcatgaccaggctcagctaatttttgtttttttggtagagacggggtttcaccatattggccaggctggtctccaactcctaatctcaggtgatctacccaccttggcctcccaaattgctgggattacaggcgtgaaccactgctcccttccctgtccttctgattttaaaaaaaagagaaatgttctggcacctgcacttgcactggggacagcctattttgctagtttgttttgtttcgttttgttttgatggagagcgtatgttgtttaaacgcggccgcgtagataagtagcatggcgggttaatcattaactacaaggaacccctagtgatggagttggccactccctctctgcgcgctcgctcgctcactgaggccgggcgaccaaaggtcgcccgacgcccgggctttgcccgggcggcctcagtgagcgagcgagcgcgcagttaattaaggcgccctaggccgacccttagactctgtactcagttctataaacgagccattggatacgagatccgtagattgataagggacacggaatatccccggacgcaatagacaccggtggacagcttggtatcctgagcacagtcgcgcgtccgaatctagctctactttagaggccccggattctgatggtcgtagaccgcagaaccgattggggggatgagatctactagttatcagcacacaattgcccattatacgcgcgtataatggactattgtgtgctgatatagggataacagggtaattctagagctagcatatggatccatcgatttgatgcggtattttctccttacgcatctgtgcggtatttcacaccgcatacgtcaaagcaaccatagtacgcgccctgtagcggcgcattaagcgcggcgggtgtggtggttacgcgcagcgtgaccgctacacttgccagcgccctagcgcccgctcctttcgctttcttcccttcctttctcgccacgttcgccggctttccccgtcaagctctaaatcgggggctccctttagggttccgatttagtgctttacggcacctcgaccccaaaaaacttgatttgggtgatggttcacgtagtgggccatcgccctgatagacggtttttcgccctttgacgttggagtccacgttctttaatagtggactcttgttccaaactggaacaacactcaactctatctcgggctattcttttgatttataagggattttgccgatttcggtctattggttaaaaaatgagctgatttaacaaaaatttaacgcgaattttaacaaaatattaacgtttacaattttatggtgcactctcagtacaatctgctctgatgccgcatagttaagccagccccgacacccgccaacacccgctgacgcgccctgacgggcttgtctgctcccggcatccgcttacagacaagctgtgaccgtctccgggagctgcatgtgtcagaggttttcaccgtcatcaccgaaacgcgcgagacgaaagggcctcgtgatacgcctatttttataggttaatgtcatgataataatggtttcttagacgtcaggtggcacttttcggggaaatgtgcgcggaacccctatttgtttatttttctaaatacattcaaatatgtatccgctcatgagacaataaccctgataaatgcttcaataatattgaaaaaggaagagtatgagccatattcaacgggaaacgtcgaggccgcgattaaattccaacatggatgctgatttatatgggtataaatgggctcgcgataatgtcgggcaatcaggtgcgacaatctatcgcttgtatgggaagcccgatgcgccagagttgtttctgaaacatggcaaaggtagcgttgccaatgatgttacagatgagatggtcagactaaactggctgacggaatttatgcctcttccgaccatcaagcattttatccgtactcctgatgatgcatggttactcaccactgcgatccccggaaaaacagcattccaggtattagaagaatatcctgattcaggtgaaaatattgttgatgcgctggcagtgttcctgcgccggttgcattcgattcctgtttgtaattgtccttttaacagcgatcgcgtatttcgtctcgctcaggcgcaatcacgaatgaataacggtttggttgatgcgagtgattttgatgacgagcgtaatggctggcctgttgaacaagtctggaaagaaatgcataaacttttgccattctcaccggattcagtcgtcactcatggtgatttctcacttgataaccttatttttgacgaggggaaattaataggttgtattgatgttggacgagtcggaatcgcagaccgataccaggatcttgccatcctatggaactgcctcggtgagttttctccttcattacagaaacggctttttcaaaaatatggtattgataatcctgatatgaataaattgcagtttcatttgatgctcgatgagtttttctaagcgtataatggtctagagctagcatatggatccatcgattccattatacgcctgtcagaccaagtttactcatatatactttagattgatttaaaacttcatttttaatttaaaaggatctaggtgaagatcctttttgataatctcatgaccaaaatcccttaacgtgagttttcgttccactgagcgtcagaccccgtagaaaagatcaaaggatcttcttgagatcctttttttctgcgcgtaatctgctgcttgcaaacaaaaaaaccaccgctaccagcggtggtttgtttgccggatcaagagctaccaactctttttccgaaggtaactggcttcagcagagcgcagataccaaatactgttcttctagtgtagccgtagttaggccaccacttcaagaactctgtagcaccgcctacatacctcgctctgctaatcctgttaccagtggctgctgccagtggcgataagtcgtgtcttaccgggttggactcaagacgatagttaccggataaggcgcagcggtcgggctgaacggggggttcgtgcacacagcccagcttggagcgaacgacctacaccgaactgagatacctacagcgtgagctatgagaaagcgccacgcttcccgaagggagaaaggcggacaggtatccggtaagcggcagggtcggaacaggagagcgcacgagggagcttccagggggaaacgcctggtatctttatagtcctgtcgggtttcgccacctctgacttgagcgtcgatttttgtgatgctcgtcaggggggcggagcctatggaaaaacgccagcaacgcggcctttttacggttcctggccttttgctggccttttgctcacatgt

SEQ ID NO: 492 - DNA, 7996 bp, synthetic construct
  source 1..7996: mol_type = other DNA
tctagagctagcatatggatccatcgatttagggataacagggtaattatcagcacacaattgcccattatacgcgcgtataatggactattgtgtgctgatatctgtacacttaagggctagatcttagcttacgtcactagagggtccacgtttagtttttaagatccattgatctcctaaacgctgcaagattcgcaacctggtatacttagcctaggcgctaggtcctagtgcagcgggactttttttctaaagtcgttgagaggaggagtcgtcagaccagatagctttgatgtcctgatcggaaggatcgttggcccccctgcaggcagctgttaattaactgcgcgctcgctcgctcactgaggccgcccgggcaaagcccgggcgtcgggcgacctttggtcgcccggcctcagtgagcgagcgagcgcgcagagagggagtggccaactccatcactaggggttccttgtagttaatgattaacccgccatgctacttatctacggcgcgccacgcgttctaggagttaatttttaaaaagcagtcaaaagtccaagtgcccttgcgagcatttactctctctgtttgctctggttaataatctcaggagcacaaacattccttactagttctaggagttaatttttaaaaagcagtcaaaagtccaagtgcccttgcgagcatttactctctctgtttgctctggttaataatctcaggagcacaaacattccttactagttctagagcggccgccagtgtgctggaattcggcttttttagggctggaagctacctttgacatcatttcctctgcgaatgcatgtataatttctacagaacctattagaaaggatcacccagcctctgcttttgtacaactttcccttaaaaaactgccaatcccactgctgtttggcccaatagtgagaactttttcctgctgcctcttggtgcttttgcctatggcccctattctgcctgctgaagacactcttgccagcatggacttaaacccctccagctctgacaatcctctttctcttttgttttacatgaagggtctggcagccaaagcaatcactcaaagttcaaaccttatcattttttgctttgttcctcttggccttggttttgtacatcagctttgaaaataccatcccagggttaatgctggggttaatttataactgagagtgctctagttctgcaatacaggacatgctataaaaatggaaagatgttgctttctgagagatcaggtggattcttgggcatttgcttaagcttggtaccgccaccatgggggtgaggcaccctccctgttctcactacagaatgcagctgctgtcctgcattgcactgtcactggcactggttaccaactcacagcagggggccagcaggccaggccccagggatgcccaggcccaccctggcagacccagggctgtgcccacccagtgtgatgtgcctcccaacagcagatttgactgtgcccctgataaggccattactcaggaacagtgtgaggccaggggctgctgctatatccctgccaagcagggcctgcagggggcccagatggggcagccctggtgcttcttcccccccagctacccctcttataagctggagaatctgagcagctctgaaatgggctacactgccactctgaccaggactacccccaccttcttccccaaggatattctgactctgaggctggatgtgatgatggagactgagaacaggctgcacttcaccatcaaggaccctgccaacaggaggtatgaggtgcccctggaaactcccagggtgcactctagggcccccagccccctgtattctgtggagttctctgaggagccttttggggtcattgtccacaggcagctggatggcagggtgctgctgaatactactgtggcccctctgttctttgctgaccagttcctgcagctgagcaccagcctgccttctcagtacattactggcctggctgagcatctgagccccctgatgctgagcacctcttggaccagaatcaccctgtggaacagggacctggctcccactcctggggccaacctgtatggcagccaccccttctacctggccctggaggatgggggctctgcccatggggtgttcctgctgaacagcaatgccatggatgtggtgctgcagccctctcctgccctgtcttggagatctactgggggcatcctggatgtgtatatcttcctggggcctgagcccaagtctgtggtgcagcagtacctggatgtggtgggctaccccttcatgcccccctactggggcctgggcttccacctgtgcaggtggggctactcttctactgctatcaccaggcaggtggtggagaacatgaccagggctcacttccctctggatgtgcagtggaatgacctggactacatggactctaggagagacttcacttttaataaggatgggttcagggactttcctgccatggtgcaggagctgcatcaggggggcaggagatatatgatgattgtggaccctgctatttctagctctggccctgctggcagctataggccctatgatgaggggctgaggaggggggtgttcatcactaatgagactggccagcccctgattggcaaggtgtggcctggctctactgccttccctgatttcaccaaccccactgccctggcctggtgggaggatatggtggctgagtttcatgaccaggtgccctttgatggcatgtggattgacatgaatgagcccagcaactttatcaggggctctgaagatggctgccccaacaatgagctggagaaccccccctatgtgcctggggtggtggggggcaccctgcaggctgccaccatctgtgccagcagccaccagttcctgagcacccactataacctgcacaacctgtatggcctgactgaggccattgcctctcacagggccctggtgaaggctagggggactaggccctttgtgatcagcaggtctacttttgctggccatggcaggtatgctgggcactggactggggatgtgtggtctagctgggagcagctggccagctctgtgcctgagatcctgcagtttaatctgctgggggtgcccctggtgggggctgatgtgtgtggcttcctgggcaatacctctgaggagctgtgtgtgaggtggactcagctgggggctttctaccccttcatgagaaaccacaactctctgctgagcctgccccaggagccctattctttttctgagcctgcccagcaggctatgaggaaggccctgactctgaggtatgccctgctgccccacctgtataccctgttccatcaggcccatgtggctggggagactgtggccagacctctgttcctggagttccccaaggatagctctacttggactgtggaccaccagctgctgtggggggaggctctgctgatcacccctgtgctgcaggctgggaaggctgaggtgactggctatttccccctgggcacctggtatgatctgcagactgtgcccattgaggccctgggctctctgccccctccccctgctgcccccagggagcctgccatccactctgagggccagtgggtgaccctgcctgcccctctggacactatcaatgtgcacctgagggctggctacatcatccccctgcagggccctggcctgactaccactgagtctaggcagcagcccatggccctggctgtggctctgaccaaggggggggaggccaggggggagctgttctgggatgatggggagtctctggaggtgctggagaggggggcctacacccaggtgatcttcctggctaggaataacaccattgtcaatgagctggtgagggtgacctctgagggggctggcctgcagctgcagaaggtgactgtgctgggggtggctactgccccccagcaggtgctgagcaatggggtgcctgtgagcaacttcacctatagccctgacaccaaggtgctggacatctgtgtgagcctgctgatgggggagcagttcctggtgagctggtgctaatttaaatctcgagccgggcggagtgtgttagtctctccagagggaggctggttccccagggaagcagagcctgtgtgcgggcagcagctgtgtgcgggcctgggggttgttaagtgcaattatttttaataaaaggggcatttggaaaaaaaaaaaaaaggtagcagtcgacagatgaattctgcagatctgtggcttctagctgcccgggtggcatccctgtgacccctccccagtgcctctcctggccctggaagttgccactccagtgcccaccagccttgtcctaataaaattaagttgcatcattttgtctgactaggtgtccttctataatattatggggtggaggggggtggtatggagcaaggggcaagttgggaagacaacctgtagggcctgcggggtctattgggaaccaagctggagtgcagtggcacaatcttggctcactgcaatctccgcctcctgggttcaagcgattctcctgcctcagcctcccgagttgttgggattccaggcatgcatgaccaggctcagctaatttttgtttttttggtagagacggggtttcaccatattggccaggctggtctccaactcctaatctcaggtgatctacccaccttggcctcccaaattgctgggattacaggcgtgaaccactgctcccttccctgtccttctgattttaaaaaaaagagaaatgttctggcacctgcacttgcactggggacagcctattttgctagtttgttttgtttcgttttgttttgatggagagcgtatgttgtttaaacgcggccgcgtagataagtagcatggcgggttaatcattaactacaaggaacccctagtgatggagttggccactccctctctgcgcgctcgctcgctcactgaggccgggcgaccaaaggtcgcccgacgcccgggctttgcccgggcggcctcagtgagcgagcgagcgcgcagttaattaaggcgccctaggccgacccttagactctgtactcagttctataaacgagccattggatacgagatccgtagattgataagggacacggaatatccccggacgcaatagacaccggtggacagcttggtatcctgagcacagtcgcgcgtccgaatctagctctactttagaggccccggattctgatggtcgtagaccgcagaaccgattggggggatgagatctactagttatcagcacacaattgcccattatacgcgcgtataatggactattgtgtgctgatatagggataacagggtaattctagagctagcatatggatccatcgatttgatgcggtattttctccttacgcatctgtgcggtatttcacaccgcatacgtcaaagcaaccatagtacgcgccctgtagcggcgcattaagcgcggcgggtgtggtggttacgcgcagcgtgaccgctacacttgccagcgccctagcgcccgctcctttcgctttcttcccttcctttctcgccacgttcgccggctttccccgtcaagctctaaatcgggggctccctttagggttccgatttagtgctttacggcacctcgaccccaaaaaacttgatttgggtgatggttcacgtagtgggccatcgccctgatagacggtttttcgccctttgacgttggagtccacgttctttaatagtggactcttgttccaaactggaacaacactcaactctatctcgggctattcttttgatttataagggattttgccgatttcggtctattggttaaaaaatgagctgatttaacaaaaatttaacgcgaattttaacaaaatattaacgtttacaattttatggtgcactctcagtacaatctgctctgatgccgcatagttaagccagccccgacacccgccaacacccgctgacgcgccctgacgggcttgtctgctcccggcatccgcttacagacaagctgtgaccgtctccgggagctgcatgtgtcagaggttttcaccgtcatcaccgaaacgcgcgagacgaaagggcctcgtgatacgcctatttttataggttaatgtcatgataataatggtttcttagacgtcaggtggcacttttcggggaaatgtgcgcggaacccctatttgtttatttttctaaatacattcaaatatgtatccgctcatgagacaataaccctgataaatgcttcaataatattgaaaaaggaagagtatgagccatattcaacgggaaacgtcgaggccgcgattaaattccaacatggatgctgatttatatgggtataaatgggctcgcgataatgtcgggcaatcaggtgcgacaatctatcgcttgtatgggaagcccgatgcgccagagttgtttctgaaacatggcaaaggtagcgttgccaatgatgttacagatgagatggtcagactaaactggctgacggaatttatgcctcttccgaccatcaagcattttatccgtactcctgatgatgcatggttactcaccactgcgatccccggaaaaacagcattccaggtattagaagaatatcctgattcaggtgaaaatattgttgatgcgctggcagtgttcctgcgccggttgcattcgattcctgtttgtaattgtccttttaacagcgatcgcgtatttcgtctcgctcaggcgcaatcacgaatgaataacggtttggttgatgcgagtgattttgatgacgagcgtaatggctggcctgttgaacaagtctggaaagaaatgcataaacttttgccattctcaccggattcagtcgtcactcatggtgatttctcacttgataaccttatttttgacgaggggaaattaataggttgtattgatgttggacgagtcggaatcgcagaccgataccaggatcttgccatcctatggaactgcctcggtgagttttctccttcattacagaaacggctttttcaaaaatatggtattgataatcctgatatgaataaattgcagtttcatttgatgctcgatgagtttttctaagcgtataatggtctagagctagcatatggatccatcgattccattatacgcctgtcagaccaagtttactcatatatactttagattgatttaaaacttcatttttaatttaaaaggatctaggtgaagatcctttttgataatctcatgaccaaaatcccttaacgtgagttttcgttccactgagcgtcagaccccgtagaaaagatcaaaggatcttcttgagatcctttttttctgcgcgtaatctgctgcttgcaaacaaaaaaaccaccgctaccagcggtggtttgtttgccggatcaagagctaccaactctttttccgaaggtaactggcttcagcagagcgcagataccaaatactgttcttctagtgtagccgtagttaggccaccacttcaagaactctgtagcaccgcctacatacctcgctctgctaatcctgttaccagtggctgctgccagtggcgataagtcgtgtcttaccgggttggactcaagacgatagttaccggataaggcgcagcggtcgggctgaacggggggttcgtgcacacagcccagcttggagcgaacgacctacaccgaactgagatacctacagcgtgagctatgagaaagcgccacgcttcccgaagggagaaaggcggacaggtatccggtaagcggcagggtcggaacaggagagcgcacgagggagcttccagggggaaacgcctggtatctttatagtcctgtcgggtttcgccacctctgacttgagcgtcgatttttgtgatgctcgtcaggggggcggagcctatggaaaaacgccagcaacgcggcctttttacggttcctggccttttgctggccttttgctcacatgt

SEQ ID NO: 493 - DNA, 7996 bp, synthetic construct
  source 1..7996: mol_type = other DNA
tctagagctagcatatggatccatcgatttagggataacagggtaattatcagcacacaattgcccattatacgcgcgtataatggactattgtgtgctgatatctgtacacttaagggctagatcttagcttacgtcactagagggtccacgtttagtttttaagatccattgatctcctaaacgctgcaagattcgcaacctggtatacttagcctaggcgctaggtcctagtgcagcgggactttttttctaaagtcgttgagaggaggagtcgtcagaccagatagctttgatgtcctgatcggaaggatcgttggcccccctgcaggcagctgttaattaactgcgcgctcgctcgctcactgaggccgcccgggcaaagcccgggcgtcgggcgacctttggtcgcccggcctcagtgagcgagcgagcgcgcagagagggagtggccaactccatcactaggggttccttgtagttaatgattaacccgccatgctacttatctacggcgcgccacgcgttctaggagttaatttttaaaaagcagtcaaaagtccaagtgcccttgcgagcatttactctctctgtttgctctggttaataatctcaggagcacaaacattccttactagttctaggagttaatttttaaaaagcagtcaaaagtccaagtgcccttgcgagcatttactctctctgtttgctctggttaataatctcaggagcacaaacattccttactagttctagagcggccgccagtgtgctggaattcggcttttttagggctggaagctacctttgacatcatttcctctgcgaatgcatgtataatttctacagaacctattagaaaggatcacccagcctctgcttttgtacaactttcccttaaaaaactgccaatcccactgctgtttggcccaatagtgagaactttttcctgctgcctcttggtgcttttgcctatggcccctattctgcctgctgaagacactcttgccagcatggacttaaacccctccagctctgacaatcctctttctcttttgttttacatgaagggtctggcagccaaagcaatcactcaaagttcaaaccttatcattttttgctttgttcctcttggccttggttttgtacatcagctttgaaaataccatcccagggttaatgctggggttaatttataactgagagtgctctagttctgcaatacaggacatgctataaaaatggaaagatgttgctttctgagagatcaggtggattcttgggcatttgcttaagcttggtaccgccaccatgggggtgaggcaccctccctgttctcatgagtttgggctgagctgggtctttctggtggccctgctgaagggagtccagtgtgagcagcagggggccagcaggccaggccccagggatgcccaggcccaccctggcagacccagggctgtgcccacccagtgtgatgtgcctcccaacagcagatttgactgtgcccctgataaggccattactcaggaacagtgtgaggccaggggctgctgctatatccctgccaagcagggcctgcagggggcccagatggggcagccctggtgcttcttcccccccagctacccctcttataagctggagaatctgagcagctctgaaatgggctacactgccactctgaccaggactacccccaccttcttccccaaggatattctgactctgaggctggatgtgatgatggagactgagaacaggctgcacttcaccatcaaggaccctgccaacaggaggtatgaggtgcccctggaaactcccagggtgcactctagggcccccagccccctgtattctgtggagttctctgaggagccttttggggtcattgtccacaggcagctggatggcagggtgctgctgaatactactgtggcccctctgttctttgctgaccagttcctgcagctgagcaccagcctgccttctcagtacattactggcctggctgagcatctgagccccctgatgctgagcacctcttggaccagaatcaccctgtggaacagggacctggctcccactcctggggccaacctgtatggcagccaccccttctacctggccctggaggatgggggctctgcccatggggtgttcctgctgaacagcaatgccatggatgtggtgctgcagccctctcctgccctgtcttggagatctactgggggcatcctggatgtgtatatcttcctggggcctgagcccaagtctgtggtgcagcagtacctggatgtggtgggctaccccttcatgcccccctactggggcctgggcttccacctgtgcaggtggggctactcttctactgctatcaccaggcaggtggtggagaacatgaccagggctcacttccctctggatgtgcagtggaatgacctggactacatggactctaggagagacttcacttttaataaggatgggttcagggactttcctgccatggtgcaggagctgcatcaggggggcaggagatatatgatgattgtggaccctgctatttctagctctggccctgctggcagctataggccctatgatgaggggctgaggaggggggtgttcatcactaatgagactggccagcccctgattggcaaggtgtggcctggctctactgccttccctgatttcaccaaccccactgccctggcctggtgggaggatatggtggctgagtttcatgaccaggtgccctttgatggcatgtggattgacatgaatgagcccagcaactttatcaggggctctgaagatggctgccccaacaatgagctggagaaccccccctatgtgcctggggtggtggggggcaccctgcaggctgccaccatctgtgccagcagccaccagttcctgagcacccactataacctgcacaacctgtatggcctgactgaggccattgcctctcacagggccctggtgaaggctagggggactaggccctttgtgatcagcaggtctacttttgctggccatggcaggtatgctgggcactggactggggatgtgtggtctagctgggagcagctggccagctctgtgcctgagatcctgcagtttaatctgctgggggtgcccctggtgggggctgatgtgtgtggcttcctgggcaatacctctgaggagctgtgtgtgaggtggactcagctgggggctttctaccccttcatgagaaaccacaactctctgctgagcctgccccaggagccctattctttttctgagcctgcccagcaggctatgaggaaggccctgactctgaggtatgccctgctgccccacctgtataccctgttccatcaggcccatgtggctggggagactgtggccagacctctgttcctggagttccccaaggatagctctacttggactgtggaccaccagctgctgtggggggaggctctgctgatcacccctgtgctgcaggctgggaaggctgaggtgactggctatttccccctgggcacctggtatgatctgcagactgtgcccattgaggccctgggctctctgccccctccccctgctgcccccagggagcctgccatccactctgagggccagtgggtgaccctgcctgcccctctggacactatcaatgtgcacctgagggctggctacatcatccccctgcagggccctggcctgactaccactgagtctaggcagcagcccatggccctggctgtggctctgaccaaggggggggaggccaggggggagctgttctgggatgatggggagtctctggaggtgctggagaggggggcctacacccaggtgatcttcctggctaggaataacaccattgtcaatgagctggtgagggtgacctctgagggggctggcctgcagctgcagaaggtgactgtgctgggggtggctactgccccccagcaggtgctgagcaatggggtgcctgtgagcaacttcacctatagccctgacaccaaggtgctggacatctgtgtgagcctgctgatgggggagcagttcctggtgagctggtgctaatttaaatctcgagccgggcggagtgtgttagtctctccagagggaggctggttccccagggaagcagagcctgtgtgcgggcagcagctgtgtgcgggcctgggggttgttaagtgcaattatttttaataaaaggggcatttggaaaaaaaaaaaaaaggtagcagtcgacagatgaattctgcagatctgtggcttctagctgcccgggtggcatccctgtgacccctccccagtgcctctcctggccctggaagttgccactccagtgcccaccagccttgtcctaataaaattaagttgcatcattttgtctgactaggtgtccttctataatattatggggtggaggggggtggtatggagcaaggggcaagttgggaagacaacctgtagggcctgcggggtctattgggaaccaagctggagtgcagtggcacaatcttggctcactgcaatctccgcctcctgggttcaagcgattctcctgcctcagcctcccgagttgttgggattccaggcatgcatgaccaggctcagctaatttttgtttttttggtagagacggggtttcaccatattggccaggctggtctccaactcctaatctcaggtgatctacccaccttggcctcccaaattgctgggattacaggcgtgaaccactgctcccttccctgtccttctgattttaaaaaaaagagaaatgttctggcacctgcacttgcactggggacagcctattttgctagtttgttttgtttcgttttgttttgatggagagcgtatgttgtttaaacgcggccgcgtagataagtagcatggcgggttaatcattaactacaaggaacccctagtgatggagttggccactccctctctgcgcgctcgctcgctcactgaggccgggcgaccaaaggtcgcccgacgcccgggctttgcccgggcggcctcagtgagcgagcgagcgcgcagttaattaaggcgccctaggccgacccttagactctgtactcagttctataaacgagccattggatacgagatccgtagattgataagggacacggaatatccccggacgcaatagacaccggtggacagcttggtatcctgagcacagtcgcgcgtccgaatctagctctactttagaggccccggattctgatggtcgtagaccgcagaaccgattggggggatgagatctactagttatcagcacacaattgcccattatacgcgcgtataatggactattgtgtgctgatatagggataacagggtaattctagagctagcatatggatccatcgatttgatgcggtattttctccttacgcatctgtgcggtatttcacaccgcatacgtcaaagcaaccatagtacgcgccctgtagcggcgcattaagcgcggcgggtgtggtggttacgcgcagcgtgaccgctacacttgccagcgccctagcgcccgctcctttcgctttcttcccttcctttctcgccacgttcgccggctttccccgtcaagctctaaatcgggggctccctttagggttccgatttagtgctttacggcacctcgaccccaaaaaacttgatttgggtgatggttcacgtagtgggccatcgccctgatagacggtttttcgccctttgacgttggagtccacgttctttaatagtggactcttgttccaaactggaacaacactcaactctatctcgggctattcttttgatttataagggattttgccgatttcggtctattggttaaaaaatgagctgatttaacaaaaatttaacgcgaattttaacaaaatattaacgtttacaattttatggtgcactctcagtacaatctgctctgatgccgcatagttaagccagccccgacacccgccaacacccgctgacgcgccctgacgggcttgtctgctcccggcatccgcttacagacaagctgtgaccgtctccgggagctgcatgtgtcagaggttttcaccgtcatcaccgaaacgcgcgagacgaaagggcctcgtgatacgcctatttttataggttaatgtcatgataataatggtttcttagacgtcaggtggcacttttcggggaaatgtgcgcggaacccctatttgtttatttttctaaatacattcaaatatgtatccgctcatgagacaataaccctgataaatgcttcaataatattgaaaaaggaagagtatgagccatattcaacgggaaacgtcgaggccgcgattaaattccaacatggatgctgatttatatgggtataaatgggctcgcgataatgtcgggcaatcaggtgcgacaatctatcgcttgtatgggaagcccgatgcgccagagttgtttctgaaacatggcaaaggtagcgttgccaatgatgttacagatgagatggtcagactaaactggctgacggaatttatgcctcttccgaccatcaagcattttatccgtactcctgatgatgcatggttactcaccactgcgatccccggaaaaacagcattccaggtattagaagaatatcctgattcaggtgaaaatattgttgatgcgctggcagtgttcctgcgccggttgcattcgattcctgtttgtaattgtccttttaacagcgatcgcgtatttcgtctcgctcaggcgcaatcacgaatgaataacggtttggttgatgcgagtgattttgatgacgagcgtaatggctggcctgttgaacaagtctggaaagaaatgcataaacttttgccattctcaccggattcagtcgtcactcatggtgatttctcacttgataaccttatttttgacgaggggaaattaataggttgtattgatgttggacgagtcggaatcgcagaccgataccaggatcttgccatcctatggaactgcctcggtgagttttctccttcattacagaaacggctttttcaaaaatatggtattgataatcctgatatgaataaattgcagtttcatttgatgctcgatgagtttttctaagcgtataatggtctagagctagcatatggatccatcgattccattatacgcctgtcagaccaagtttactcatatatactttagattgatttaaaacttcatttttaatttaaaaggatctaggtgaagatcctttttgataatctcatgaccaaaatcccttaacgtgagttttcgttccactgagcgtcagaccccgtagaaaagatcaaaggatcttcttgagatcctttttttctgcgcgtaatctgctgcttgcaaacaaaaaaaccaccgctaccagcggtggtttgtttgccggatcaagagctaccaactctttttccgaaggtaactggcttcagcagagcgcagataccaaatactgttcttctagtgtagccgtagttaggccaccacttcaagaactctgtagcaccgcctacatacctcgctctgctaatcctgttaccagtggctgctgccagtggcgataagtcgtgtcttaccgggttggactcaagacgatagttaccggataaggcgcagcggtcgggctgaacggggggttcgtgcacacagcccagcttggagcgaacgacctacaccgaactgagatacctacagcgtgagctatgagaaagcgccacgcttcccgaagggagaaaggcggacaggtatccggtaagcggcagggtcggaacaggagagcgcacgagggagcttccagggggaaacgcctggtatctttatagtcctgtcgggtttcgccacctctgacttgagcgtcgatttttgtgatgctcgtcaggggggcggagcctatggaaaaacgccagcaacgcggcctttttacggttcctggccttttgctggccttttgctcacatgt

SEQ ID NO: 494 - DNA, 7999 bp, synthetic construct
  source 1..7999: mol_type = other DNA
tctagagctagcatatggatccatcgatttagggataacagggtaattatcagcacacaattgcccattatacgcgcgtataatggactattgtgtgctgatatctgtacacttaagggctagatcttagcttacgtcactagagggtccacgtttagtttttaagatccattgatctcctaaacgctgcaagattcgcaacctggtatacttagcctaggcgctaggtcctagtgcagcgggactttttttctaaagtcgttgagaggaggagtcgtcagaccagatagctttgatgtcctgatcggaaggatcgttggcccccctgcaggcagctgttaattaactgcgcgctcgctcgctcactgaggccgcccgggcaaagcccgggcgtcgggcgacctttggtcgcccggcctcagtgagcgagcgagcgcgcagagagggagtggccaactccatcactaggggttccttgtagttaatgattaacccgccatgctacttatctacggcgcgccacgcgttctaggagttaatttttaaaaagcagtcaaaagtccaagtgcccttgcgagcatttactctctctgtttgctctggttaataatctcaggagcacaaacattccttactagttctaggagttaatttttaaaaagcagtcaaaagtccaagtgcccttgcgagcatttactctctctgtttgctctggttaataatctcaggagcacaaacattccttactagttctagagcggccgccagtgtgctggaattcggcttttttagggctggaagctacctttgacatcatttcctctgcgaatgcatgtataatttctacagaacctattagaaaggatcacccagcctctgcttttgtacaactttcccttaaaaaactgccaatcccactgctgtttggcccaatagtgagaactttttcctgctgcctcttggtgcttttgcctatggcccctattctgcctgctgaagacactcttgccagcatggacttaaacccctccagctctgacaatcctctttctcttttgttttacatgaagggtctggcagccaaagcaatcactcaaagttcaaaccttatcattttttgctttgttcctcttggccttggttttgtacatcagctttgaaaataccatcccagggttaatgctggggttaatttataactgagagtgctctagttctgcaatacaggacatgctataaaaatggaaagatgttgctttctgagagatcaggtggattcttgggcatttgcttaagcttggtaccgccaccatgggggtgaggcaccctccctgttctcactacagaatgcagctgctgtcctgcattgcactgtcactggcactggttaccaactcacagcagggagcttctagacctggacctagagatgctcaggctcatcctggaagacctagagctgtgcctacacagtgtgatgtgcctcctaattctagatttgattgtgctcctgataaggctataacacaggagcagtgtgaggctagaggatgttgttatattcctgctaagcagggactgcagggagctcagatgggacagccttggtgtttttttcctccttcttatccttcttataagctggagaatctgtcttcttctgagatgggatatacagctacactgacaagaacaacacctacattttttcctaaggatattctgacactgagactggatgtgatgatggagacagagaatagactgcattttacaattaaggatcctgctaatagaagatatgaggtgcctctagagacacctagagtgcattctagagctccttctcctctgtattctgtggagttttctgaggagccttttggagtgattgtgcatagacagctggatggaagagtgctgctgaatacaacagtggctcctctgttttttgctgatcagtttctgcagctgtctacatctctgccttctcagtatattacaggactggctgagcatctgtctcctctgatgctgtctacatcttggacaagaattacactgtggaatagagatctggctcctacacctggagctaatctgtatggatctcatcctttttatctggctctggaggatggaggatctgctcatggagtgtttctgctgaattctaatgctatggatgtagtgctgcagccttctcctgctctgtcttggagatctacaggaggaattctggatgtgtatatttttctaggacctgagcctaagtctgtggtgcagcagtatctggatgtagtgggatatccttttatgcctccttattggggactgggatttcatctgtgtagatggggatattcttctacagctattacaagacaggtggttgagaatatgacaagagctcattttcctctggatgtgcagtggaatgatctagattatatggattctagaagagattttacatttaataaggatggatttagagattttcctgctatggtgcaggagctgcatcagggaggaagaagatatatgatgattgtggatcctgctatttcttcttctggacctgctggatcttatagaccttatgatgagggactgagaagaggagtgtttattacaaatgagacaggacagcctctgattggaaaggtgtggcctggatctacagcttttcctgattttacaaatcctacagctctggcttggtgggaggatatggtggctgagtttcatgatcaggtgccttttgatggaatgtggattgatatgaatgagccttctaattttataagaggatctgaggatggatgtcctaataatgagctagagaatcctccttatgtgcctggagtagtgggaggaacactgcaggctgctacaatttgtgcttcttctcatcagtttctgtctacacattataatctgcataatctgtatggactgacagaggctattgcttctcatagagctctggtgaaggctagaggaacaagaccttttgtgatttctagatctacatttgctggacatggaagatatgctggacattggacaggagatgtatggtcttcttgggagcagctagcttcttctgtgcctgagattctgcagtttaatctgctaggagtgcctctggtgggagctgatgtgtgtggatttctgggaaatacatctgaggagctgtgtgtgagatggacacagctgggagctttttatccttttatgagaaatcataattctctgctgtctctgcctcaggagccttattctttttctgagcctgctcagcaggctatgagaaaggctctgacactgagatatgctctgctgcctcatctgtatacactgtttcatcaggctcatgtggctggagagacagtagctagacctctgtttctggagtttcctaaggattcttctacatggacagttgatcatcagctgctgtggggagaggctctgctgattacacctgtgctgcaggctggaaaggctgaggtgacaggatattttcctctgggaacatggtatgatctgcagacagtgcctatagaggctctgggatctctgcctcctcctcctgctgctcctagagagcctgctattcattctgagggacagtgggtgacactgcctgctcctctggatacaattaatgtgcatctgagagctggatatattattcctctgcagggacctggactgacaacaacagagtctagacagcagcctatggctctggctgtggctctgacaaagggaggagaggctagaggagagctgttttgggatgatggagagtctctggaggtgctggagagaggagcttatacacaggtgatttttctggctagaaataatacaattgtgaatgagctggtgagagtgacatctgagggagctggactgcagctgcagaaggtgacagtgctgggagtggctacagctcctcagcaggtgctgtctaatggagtgcctgtgtctaattttacatattctcctgatacaaaggtgctggatatttgtgtgtctctgctgatgggagagcagtttctggtgtcttggtgttaatgatttaaatctcgagccgggcggagtgtgttagtctctccagagggaggctggttccccagggaagcagagcctgtgtgcgggcagcagctgtgtgcgggcctgggggttgttaagtgcaattatttttaataaaaggggcatttggaaaaaaaaaaaaaaggtagcagtcgacagatgaattctgcagatctgtggcttctagctgcccgggtggcatccctgtgacccctccccagtgcctctcctggccctggaagttgccactccagtgcccaccagccttgtcctaataaaattaagttgcatcattttgtctgactaggtgtccttctataatattatggggtggaggggggtggtatggagcaaggggcaagttgggaagacaacctgtagggcctgcggggtctattgggaaccaagctggagtgcagtggcacaatcttggctcactgcaatctccgcctcctgggttcaagcgattctcctgcctcagcctcccgagttgttgggattccaggcatgcatgaccaggctcagctaatttttgtttttttggtagagacggggtttcaccatattggccaggctggtctccaactcctaatctcaggtgatctacccaccttggcctcccaaattgctgggattacaggcgtgaaccactgctcccttccctgtccttctgattttaaaaaaaagagaaatgttctggcacctgcacttgcactggggacagcctattttgctagtttgttttgtttcgttttgttttgatggagagcgtatgttgtttaaacgcggccgcgtagataagtagcatggcgggttaatcattaactacaaggaacccctagtgatggagttggccactccctctctgcgcgctcgctcgctcactgaggccgggcgaccaaaggtcgcccgacgcccgggctttgcccgggcggcctcagtgagcgagcgagcgcgcagttaattaaggcgccctaggccgacccttagactctgtactcagttctataaacgagccattggatacgagatccgtagattgataagggacacggaatatccccggacgcaatagacaccggtggacagcttggtatcctgagcacagtcgcgcgtccgaatctagctctactttagaggccccggattctgatggtcgtagaccgcagaaccgattggggggatgagatctactagttatcagcacacaattgcccattatacgcgcgtataatggactattgtgtgctgatatagggataacagggtaattctagagctagcatatggatccatcgatttgatgcggtattttctccttacgcatctgtgcggtatttcacaccgcatacgtcaaagcaaccatagtacgcgccctgtagcggcgcattaagcgcggcgggtgtggtggttacgcgcagcgtgaccgctacacttgccagcgccctagcgcccgctcctttcgctttcttcccttcctttctcgccacgttcgccggctttccccgtcaagctctaaatcgggggctccctttagggttccgatttagtgctttacggcacctcgaccccaaaaaacttgatttgggtgatggttcacgtagtgggccatcgccctgatagacggtttttcgccctttgacgttggagtccacgttctttaatagtggactcttgttccaaactggaacaacactcaactctatctcgggctattcttttgatttataagggattttgccgatttcggtctattggttaaaaaatgagctgatttaacaaaaatttaacgcgaattttaacaaaatattaacgtttacaattttatggtgcactctcagtacaatctgctctgatgccgcatagttaagccagccccgacacccgccaacacccgctgacgcgccctgacgggcttgtctgctcccggcatccgcttacagacaagctgtgaccgtctccgggagctgcatgtgtcagaggttttcaccgtcatcaccgaaacgcgcgagacgaaagggcctcgtgatacgcctatttttataggttaatgtcatgataataatggtttcttagacgtcaggtggcacttttcggggaaatgtgcgcggaacccctatttgtttatttttctaaatacattcaaatatgtatccgctcatgagacaataaccctgataaatgcttcaataatattgaaaaaggaagagtatgagccatattcaacgggaaacgtcgaggccgcgattaaattccaacatggatgctgatttatatgggtataaatgggctcgcgataatgtcgggcaatcaggtgcgacaatctatcgcttgtatgggaagcccgatgcgccagagttgtttctgaaacatggcaaaggtagcgttgccaatgatgttacagatgagatggtcagactaaactggctgacggaatttatgcctcttccgaccatcaagcattttatccgtactcctgatgatgcatggttactcaccactgcgatccccggaaaaacagcattccaggtattagaagaatatcctgattcaggtgaaaatattgttgatgcgctggcagtgttcctgcgccggttgcattcgattcctgtttgtaattgtccttttaacagcgatcgcgtatttcgtctcgctcaggcgcaatcacgaatgaataacggtttggttgatgcgagtgattttgatgacgagcgtaatggctggcctgttgaacaagtctggaaagaaatgcataaacttttgccattctcaccggattcagtcgtcactcatggtgatttctcacttgataaccttatttttgacgaggggaaattaataggttgtattgatgttggacgagtcggaatcgcagaccgataccaggatcttgccatcctatggaactgcctcggtgagttttctccttcattacagaaacggctttttcaaaaatatggtattgataatcctgatatgaataaattgcagtttcatttgatgctcgatgagtttttctaagcgtataatggtctagagctagcatatggatccatcgattccattatacgcctgtcagaccaagtttactcatatatactttagattgatttaaaacttcatttttaatttaaaaggatctaggtgaagatcctttttgataatctcatgaccaaaatcccttaacgtgagttttcgttccactgagcgtcagaccccgtagaaaagatcaaaggatcttcttgagatcctttttttctgcgcgtaatctgctgcttgcaaacaaaaaaaccaccgctaccagcggtggtttgtttgccggatcaagagctaccaactctttttccgaaggtaactggcttcagcagagcgcagataccaaatactgttcttctagtgtagccgtagttaggccaccacttcaagaactctgtagcaccgcctacatacctcgctctgctaatcctgttaccagtggctgctgccagtggcgataagtcgtgtcttaccgggttggactcaagacgatagttaccggataaggcgcagcggtcgggctgaacggggggttcgtgcacacagcccagcttggagcgaacgacctacaccgaactgagatacctacagcgtgagctatgagaaagcgccacgcttcccgaagggagaaaggcggacaggtatccggtaagcggcagggtcggaacaggagagcgcacgagggagcttccagggggaaacgcctggtatctttatagtcctgtcgggtttcgccacctctgacttgagcgtcgatttttgtgatgctcgtcaggggggcggagcctatggaaaaacgccagcaacgcggcctttttacggttcctggccttttgctggccttttgctcacatgt

SEQ ID NO: 495 - DNA, 7999 bp, synthetic construct
  source 1..7999: mol_type = other DNA
tctagagctagcatatggatccatcgatttagggataacagggtaattatcagcacacaattgcccattatacgcgcgtataatggactattgtgtgctgatatctgtacacttaagggctagatcttagcttacgtcactagagggtccacgtttagtttttaagatccattgatctcctaaacgctgcaagattcgcaacctggtatacttagcctaggcgctaggtcctagtgcagcgggactttttttctaaagtcgttgagaggaggagtcgtcagaccagatagctttgatgtcctgatcggaaggatcgttggcccccctgcaggcagctgttaattaactgcgcgctcgctcgctcactgaggccgcccgggcaaagcccgggcgtcgggcgacctttggtcgcccggcctcagtgagcgagcgagcgcgcagagagggagtggccaactccatcactaggggttccttgtagttaatgattaacccgccatgctacttatctacggcgcgccacgcgttctaggagttaatttttaaaaagcagtcaaaagtccaagtgcccttgcgagcatttactctctctgtttgctctggttaataatctcaggagcacaaacattccttactagttctaggagttaatttttaaaaagcagtcaaaagtccaagtgcccttgcgagcatttactctctctgtttgctctggttaataatctcaggagcacaaacattccttactagttctagagcggccgccagtgtgctggaattcggcttttttagggctggaagctacctttgacatcatttcctctgcgaatgcatgtataatttctacagaacctattagaaaggatcacccagcctctgcttttgtacaactttcccttaaaaaactgccaatcccactgctgtttggcccaatagtgagaactttttcctgctgcctcttggtgcttttgcctatggcccctattctgcctgctgaagacactcttgccagcatggacttaaacccctccagctctgacaatcctctttctcttttgttttacatgaagggtctggcagccaaagcaatcactcaaagttcaaaccttatcattttttgctttgttcctcttggccttggttttgtacatcagctttgaaaataccatcccagggttaatgctggggttaatttataactgagagtgctctagttctgcaatacaggacatgctataaaaatggaaagatgttgctttctgagagatcaggtggattcttgggcatttgcttaagcttggtaccgccaccatgggggtgaggcaccctccctgttctcatgagtttgggctgagctgggtctttctggtggccctgctgaagggagtccagtgtgagcagcagggagcttctagacctggacctagagatgctcaggctcatcctggaagacctagagctgtgcctacacagtgtgatgtgcctcctaattctagatttgattgtgctcctgataaggctataacacaggagcagtgtgaggctagaggatgttgttatattcctgctaagcagggactgcagggagctcagatgggacagccttggtgtttttttcctccttcttatccttcttataagctggagaatctgtcttcttctgagatgggatatacagctacactgacaagaacaacacctacattttttcctaaggatattctgacactgagactggatgtgatgatggagacagagaatagactgcattttacaattaaggatcctgctaatagaagatatgaggtgcctctagagacacctagagtgcattctagagctccttctcctctgtattctgtggagttttctgaggagccttttggagtgattgtgcatagacagctggatggaagagtgctgctgaatacaacagtggctcctctgttttttgctgatcagtttctgcagctgtctacatctctgccttctcagtatattacaggactggctgagcatctgtctcctctgatgctgtctacatcttggacaagaattacactgtggaatagagatctggctcctacacctggagctaatctgtatggatctcatcctttttatctggctctggaggatggaggatctgctcatggagtgtttctgctgaattctaatgctatggatgtagtgctgcagccttctcctgctctgtcttggagatctacaggaggaattctggatgtgtatatttttctaggacctgagcctaagtctgtggtgcagcagtatctggatgtagtgggatatccttttatgcctccttattggggactgggatttcatctgtgtagatggggatattcttctacagctattacaagacaggtggttgagaatatgacaagagctcattttcctctggatgtgcagtggaatgatctagattatatggattctagaagagattttacatttaataaggatggatttagagattttcctgctatggtgcaggagctgcatcagggaggaagaagatatatgatgattgtggatcctgctatttcttcttctggacctgctggatcttatagaccttatgatgagggactgagaagaggagtgtttattacaaatgagacaggacagcctctgattggaaaggtgtggcctggatctacagcttttcctgattttacaaatcctacagctctggcttggtgggaggatatggtggctgagtttcatgatcaggtgccttttgatggaatgtggattgatatgaatgagccttctaattttataagaggatctgaggatggatgtcctaataatgagctagagaatcctccttatgtgcctggagtagtgggaggaacactgcaggctgctacaatttgtgcttcttctcatcagtttctgtctacacattataatctgcataatctgtatggactgacagaggctattgcttctcatagagctctggtgaaggctagaggaacaagaccttttgtgatttctagatctacatttgctggacatggaagatatgctggacattggacaggagatgtatggtcttcttgggagcagctagcttcttctgtgcctgagattctgcagtttaatctgctaggagtgcctctggtgggagctgatgtgtgtggatttctgggaaatacatctgaggagctgtgtgtgagatggacacagctgggagctttttatccttttatgagaaatcataattctctgctgtctctgcctcaggagccttattctttttctgagcctgctcagcaggctatgagaaaggctctgacactgagatatgctctgctgcctcatctgtatacactgtttcatcaggctcatgtggctggagagacagtagctagacctctgtttctggagtttcctaaggattcttctacatggacagttgatcatcagctgctgtggggagaggctctgctgattacacctgtgctgcaggctggaaaggctgaggtgacaggatattttcctctgggaacatggtatgatctgcagacagtgcctatagaggctctgggatctctgcctcctcctcctgctgctcctagagagcctgctattcattctgagggacagtgggtgacactgcctgctcctctggatacaattaatgtgcatctgagagctggatatattattcctctgcagggacctggactgacaacaacagagtctagacagcagcctatggctctggctgtggctctgacaaagggaggagaggctagaggagagctgttttgggatgatggagagtctctggaggtgctggagagaggagcttatacacaggtgatttttctggctagaaataatacaattgtgaatgagctggtgagagtgacatctgagggagctggactgcagctgcagaaggtgacagtgctgggagtggctacagctcctcagcaggtgctgtctaatggagtgcctgtgtctaattttacatattctcctgatacaaaggtgctggatatttgtgtgtctctgctgatgggagagcagtttctggtgtcttggtgttaatgatttaaatctcgagccgggcggagtgtgttagtctctccagagggaggctggttccccagggaagcagagcctgtgtgcgggcagcagctgtgtgcgggcctgggggttgttaagtgcaattatttttaataaaaggggcatttggaaaaaaaaaaaaaaggtagcagtcgacagatgaattctgcagatctgtggcttctagctgcccgggtggcatccctgtgacccctccccagtgcctctcctggccctggaagttgccactccagtgcccaccagccttgtcctaataaaattaagttgcatcattttgtctgactaggtgtccttctataatattatggggtggaggggggtggtatggagcaaggggcaagttgggaagacaacctgtagggcctgcggggtctattgggaaccaagctggagtgcagtggcacaatcttggctcactgcaatctccgcctcctgggttcaagcgattctcctgcctcagcctcccgagttgttgggattccaggcatgcatgaccaggctcagctaatttttgtttttttggtagagacggggtttcaccatattggccaggctggtctccaactcctaatctcaggtgatctacccaccttggcctcccaaattgctgggattacaggcgtgaaccactgctcccttccctgtccttctgattttaaaaaaaagagaaatgttctggcacctgcacttgcactggggacagcctattttgctagtttgttttgtttcgttttgttttgatggagagcgtatgttgtttaaacgcggccgcgtagataagtagcatggcgggttaatcattaactacaaggaacccctagtgatggagttggccactccctctctgcgcgctcgctcgctcactgaggccgggcgaccaaaggtcgcccgacgcccgggctttgcccgggcggcctcagtgagcgagcgagcgcgcagttaattaaggcgccctaggccgacccttagactctgtactcagttctataaacgagccattggatacgagatccgtagattgataagggacacggaatatccccggacgcaatagacaccggtggacagcttggtatcctgagcacagtcgcgcgtccgaatctagctctactttagaggccccggattctgatggtcgtagaccgcagaaccgattggggggatgagatctactagttatcagcacacaattgcccattatacgcgcgtataatggactattgtgtgctgatatagggataacagggtaattctagagctagcatatggatccatcgatttgatgcggtattttctccttacgcatctgtgcggtatttcacaccgcatacgtcaaagcaaccatagtacgcgccctgtagcggcgcattaagcgcggcgggtgtggtggttacgcgcagcgtgaccgctacacttgccagcgccctagcgcccgctcctttcgctttcttcccttcctttctcgccacgttcgccggctttccccgtcaagctctaaatcgggggctccctttagggttccgatttagtgctttacggcacctcgaccccaaaaaacttgatttgggtgatggttcacgtagtgggccatcgccctgatagacggtttttcgccctttgacgttggagtccacgttctttaatagtggactcttgttccaaactggaacaacactcaactctatctcgggctattcttttgatttataagggattttgccgatttcggtctattggttaaaaaatgagctgatttaacaaaaatttaacgcgaattttaacaaaatattaacgtttacaattttatggtgcactctcagtacaatctgctctgatgccgcatagttaagccagccccgacacccgccaacacccgctgacgcgccctgacgggcttgtctgctcccggcatccgcttacagacaagctgtgaccgtctccgggagctgcatgtgtcagaggttttcaccgtcatcaccgaaacgcgcgagacgaaagggcctcgtgatacgcctatttttataggttaatgtcatgataataatggtttcttagacgtcaggtggcacttttcggggaaatgtgcgcggaacccctatttgtttatttttctaaatacattcaaatatgtatccgctcatgagacaataaccctgataaatgcttcaataatattgaaaaaggaagagtatgagccatattcaacgggaaacgtcgaggccgcgattaaattccaacatggatgctgatttatatgggtataaatgggctcgcgataatgtcgggcaatcaggtgcgacaatctatcgcttgtatgggaagcccgatgcgccagagttgtttctgaaacatggcaaaggtagcgttgccaatgatgttacagatgagatggtcagactaaactggctgacggaatttatgcctcttccgaccatcaagcattttatccgtactcctgatgatgcatggttactcaccactgcgatccccggaaaaacagcattccaggtattagaagaatatcctgattcaggtgaaaatattgttgatgcgctggcagtgttcctgcgccggttgcattcgattcctgtttgtaattgtccttttaacagcgatcgcgtatttcgtctcgctcaggcgcaatcacgaatgaataacggtttggttgatgcgagtgattttgatgacgagcgtaatggctggcctgttgaacaagtctggaaagaaatgcataaacttttgccattctcaccggattcagtcgtcactcatggtgatttctcacttgataaccttatttttgacgaggggaaattaataggttgtattgatgttggacgagtcggaatcgcagaccgataccaggatcttgccatcctatggaactgcctcggtgagttttctccttcattacagaaacggctttttcaaaaatatggtattgataatcctgatatgaataaattgcagtttcatttgatgctcgatgagtttttctaagcgtataatggtctagagctagcatatggatccatcgattccattatacgcctgtcagaccaagtttactcatatatactttagattgatttaaaacttcatttttaatttaaaaggatctaggtgaagatcctttttgataatctcatgaccaaaatcccttaacgtgagttttcgttccactgagcgtcagaccccgtagaaaagatcaaaggatcttcttgagatcctttttttctgcgcgtaatctgctgcttgcaaacaaaaaaaccaccgctaccagcggtggtttgtttgccggatcaagagctaccaactctttttccgaaggtaactggcttcagcagagcgcagataccaaatactgttcttctagtgtagccgtagttaggccaccacttcaagaactctgtagcaccgcctacatacctcgctctgctaatcctgttaccagtggctgctgccagtggcgataagtcgtgtcttaccgggttggactcaagacgatagttaccggataaggcgcagcggtcgggctgaacggggggttcgtgcacacagcccagcttggagcgaacgacctacaccgaactgagatacctacagcgtgagctatgagaaagcgccacgcttcccgaagggagaaaggcggacaggtatccggtaagcggcagggtcggaacaggagagcgcacgagggagcttccagggggaaacgcctggtatctttatagtcctgtcgggtttcgccacctctgacttgagcgtcgatttttgtgatgctcgtcaggggggcggagcctatggaaaaacgccagcaacgcggcctttttacggttcctggccttttgctggccttttgctcacatgt

SEQ ID NO: 496 - DNA, 8047 bp, synthetic construct
  source 1..8047: mol_type = other DNA
tctagagctagcatatggatccatcgatttagggataacagggtaattatcagcacacaattgcccattatacgcgcgtataatggactattgtgtgctgatatctgtacacttaagggctagatcttagcttacgtcactagagggtccacgtttagtttttaagatccattgatctcctaaacgctgcaagattcgcaacctggtatacttagcctaggcgctaggtcctagtgcagcgggactttttttctaaagtcgttgagaggaggagtcgtcagaccagatagctttgatgtcctgatcggaaggatcgttggcccccctgcaggcagctgttaattaactgcgcgctcgctcgctcactgaggccgcccgggcaaagcccgggcgtcgggcgacctttggtcgcccggcctcagtgagcgagcgagcgcgcagagagggagtggccaactccatcactaggggttccttgtagttaatgattaacccgccatgctacttatctacggcgcgccacgcgttctaggagttaatttttaaaaagcagtcaaaagtccaagtgcccttgcgagcatttactctctctgtttgctctggttaataatctcaggagcacaaacattccttactagttctaggagttaatttttaaaaagcagtcaaaagtccaagtgcccttgcgagcatttactctctctgtttgctctggttaataatctcaggagcacaaacattccttactagttctagagcggccgccagtgtgctggaattcggcttttttagggctggaagctacctttgacatcatttcctctgcgaatgcatgtataatttctacagaacctattagaaaggatcacccagcctctgcttttgtacaactttcccttaaaaaactgccaatcccactgctgtttggcccaatagtgagaactttttcctgctgcctcttggtgcttttgcctatggcccctattctgcctgctgaagacactcttgccagcatggacttaaacccctccagctctgacaatcctctttctcttttgttttacatgaagggtctggcagccaaagcaatcactcaaagttcaaaccttatcattttttgctttgttcctcttggccttggttttgtacatcagctttgaaaataccatcccagggttaatgctggggttaatttataactgagagtgctctagttctgcaatacaggacatgctataaaaatggaaagatgttgctttctgagagatcaggtggattcttgggcatttgcttaagcttggtaccgccaccatgggggtgaggcaccctccctgttctcacaggctgctggctgtgtgtgctctggtgtctctggccactgctgccctgctgtacagaatgcagctgctgtcctgcattgcactgtcactggcactggttaccaactcacagcagggggccagcaggccaggccccagggatgcccaggcccaccctggcagacccagggctgtgcccacccagtgtgatgtgcctcccaacagcagatttgactgtgcccctgataaggccattactcaggaacagtgtgaggccaggggctgctgctatatccctgccaagcagggcctgcagggggcccagatggggcagccctggtgcttcttcccccccagctacccctcttataagctggagaatctgagcagctctgaaatgggctacactgccactctgaccaggactacccccaccttcttccccaaggatattctgactctgaggctggatgtgatgatggagactgagaacaggctgcacttcaccatcaaggaccctgccaacaggaggtatgaggtgcccctggaaactcccagggtgcactctagggcccccagccccctgtattctgtggagttctctgaggagccttttggggtcattgtccacaggcagctggatggcagggtgctgctgaatactactgtggcccctctgttctttgctgaccagttcctgcagctgagcaccagcctgccttctcagtacattactggcctggctgagcatctgagccccctgatgctgagcacctcttggaccagaatcaccctgtggaacagggacctggctcccactcctggggccaacctgtatggcagccaccccttctacctggccctggaggatgggggctctgcccatggggtgttcctgctgaacagcaatgccatggatgtggtgctgcagccctctcctgccctgtcttggagatctactgggggcatcctggatgtgtatatcttcctggggcctgagcccaagtctgtggtgcagcagtacctggatgtggtgggctaccccttcatgcccccctactggggcctgggcttccacctgtgcaggtggggctactcttctactgctatcaccaggcaggtggtggagaacatgaccagggctcacttccctctggatgtgcagtggaatgacctggactacatggactctaggagagacttcacttttaataaggatgggttcagggactttcctgccatggtgcaggagctgcatcaggggggcaggagatatatgatgattgtggaccctgctatttctagctctggccctgctggcagctataggccctatgatgaggggctgaggaggggggtgttcatcactaatgagactggccagcccctgattggcaaggtgtggcctggctctactgccttccctgatttcaccaaccccactgccctggcctggtgggaggatatggtggctgagtttcatgaccaggtgccctttgatggcatgtggattgacatgaatgagcccagcaactttatcaggggctctgaagatggctgccccaacaatgagctggagaaccccccctatgtgcctggggtggtggggggcaccctgcaggctgccaccatctgtgccagcagccaccagttcctgagcacccactataacctgcacaacctgtatggcctgactgaggccattgcctctcacagggccctggtgaaggctagggggactaggccctttgtgatcagcaggtctacttttgctggccatggcaggtatgctgggcactggactggggatgtgtggtctagctgggagcagctggccagctctgtgcctgagatcctgcagtttaatctgctgggggtgcccctggtgggggctgatgtgtgtggcttcctgggcaatacctctgaggagctgtgtgtgaggtggactcagctgggggctttctaccccttcatgagaaaccacaactctctgctgagcctgccccaggagccctattctttttctgagcctgcccagcaggctatgaggaaggccctgactctgaggtatgccctgctgccccacctgtataccctgttccatcaggcccatgtggctggggagactgtggccagacctctgttcctggagttccccaaggatagctctacttggactgtggaccaccagctgctgtggggggaggctctgctgatcacccctgtgctgcaggctgggaaggctgaggtgactggctatttccccctgggcacctggtatgatctgcagactgtgcccattgaggccctgggctctctgccccctccccctgctgcccccagggagcctgccatccactctgagggccagtgggtgaccctgcctgcccctctggacactatcaatgtgcacctgagggctggctacatcatccccctgcagggccctggcctgactaccactgagtctaggcagcagcccatggccctggctgtggctctgaccaaggggggggaggccaggggggagctgttctgggatgatggggagtctctggaggtgctggagaggggggcctacacccaggtgatcttcctggctaggaataacaccattgtcaatgagctggtgagggtgacctctgagggggctggcctgcagctgcagaaggtgactgtgctgggggtggctactgccccccagcaggtgctgagcaatggggtgcctgtgagcaacttcacctatagccctgacaccaaggtgctggacatctgtgtgagcctgctgatgggggagcagttcctggtgagctggtgctaatttaaatctcgagccgggcggagtgtgttagtctctccagagggaggctggttccccagggaagcagagcctgtgtgcgggcagcagctgtgtgcgggcctgggggttgttaagtgcaattatttttaataaaaggggcatttggaaaaaaaaaaaaaaggtagcagtcgacagatgaattctgcagatctgtggcttctagctgcccgggtggcatccctgtgacccctccccagtgcctctcctggccctggaagttgccactccagtgcccaccagccttgtcctaataaaattaagttgcatcattttgtctgactaggtgtccttctataatattatggggtggaggggggtggtatggagcaaggggcaagttgggaagacaacctgtagggcctgcggggtctattgggaaccaagctggagtgcagtggcacaatcttggctcactgcaatctccgcctcctgggttcaagcgattctcctgcctcagcctcccgagttgttgggattccaggcatgcatgaccaggctcagctaatttttgtttttttggtagagacggggtttcaccatattggccaggctggtctccaactcctaatctcaggtgatctacccaccttggcctcccaaattgctgggattacaggcgtgaaccactgctcccttccctgtccttctgattttaaaaaaaagagaaatgttctggcacctgcacttgcactggggacagcctattttgctagtttgttttgtttcgttttgttttgatggagagcgtatgttgtttaaacgcggccgcgtagataagtagcatggcgggttaatcattaactacaaggaacccctagtgatggagttggccactccctctctgcgcgctcgctcgctcactgaggccgggcgaccaaaggtcgcccgacgcccgggctttgcccgggcggcctcagtgagcgagcgagcgcgcagttaattaaggcgccctaggccgacccttagactctgtactcagttctataaacgagccattggatacgagatccgtagattgataagggacacggaatatccccggacgcaatagacaccggtggacagcttggtatcctgagcacagtcgcgcgtccgaatctagctctactttagaggccccggattctgatggtcgtagaccgcagaaccgattggggggatgagatctactagttatcagcacacaattgcccattatacgcgcgtataatggactattgtgtgctgatatagggataacagggtaattctagagctagcatatggatccatcgatttgatgcggtattttctccttacgcatctgtgcggtatttcacaccgcatacgtcaaagcaaccatagtacgcgccctgtagcggcgcattaagcgcggcgggtgtggtggttacgcgcagcgtgaccgctacacttgccagcgccctagcgcccgctcctttcgctttcttcccttcctttctcgccacgttcgccggctttccccgtcaagctctaaatcgggggctccctttagggttccgatttagtgctttacggcacctcgaccccaaaaaacttgatttgggtgatggttcacgtagtgggccatcgccctgatagacggtttttcgccctttgacgttggagtccacgttctttaatagtggactcttgttccaaactggaacaacactcaactctatctcgggctattcttttgatttataagggattttgccgatttcggtctattggttaaaaaatgagctgatttaacaaaaatttaacgcgaattttaacaaaatattaacgtttacaattttatggtgcactctcagtacaatctgctctgatgccgcatagttaagccagccccgacacccgccaacacccgctgacgcgccctgacgggcttgtctgctcccggcatccgcttacagacaagctgtgaccgtctccgggagctgcatgtgtcagaggttttcaccgtcatcaccgaaacgcgcgagacgaaagggcctcgtgatacgcctatttttataggttaatgtcatgataataatggtttcttagacgtcaggtggcacttttcggggaaatgtgcgcggaacccctatttgtttatttttctaaatacattcaaatatgtatccgctcatgagacaataaccctgataaatgcttcaataatattgaaaaaggaagagtatgagccatattcaacgggaaacgtcgaggccgcgattaaattccaacatggatgctgatttatatgggtataaatgggctcgcgataatgtcgggcaatcaggtgcgacaatctatcgcttgtatgggaagcccgatgcgccagagttgtttctgaaacatggcaaaggtagcgttgccaatgatgttacagatgagatggtcagactaaactggctgacggaatttatgcctcttccgaccatcaagcattttatccgtactcctgatgatgcatggttactcaccactgcgatccccggaaaaacagcattccaggtattagaagaatatcctgattcaggtgaaaatattgttgatgcgctggcagtgttcctgcgccggttgcattcgattcctgtttgtaattgtccttttaacagcgatcgcgtatttcgtctcgctcaggcgcaatcacgaatgaataacggtttggttgatgcgagtgattttgatgacgagcgtaatggctggcctgttgaacaagtctggaaagaaatgcataaacttttgccattctcaccggattcagtcgtcactcatggtgatttctcacttgataaccttatttttgacgaggggaaattaataggttgtattgatgttggacgagtcggaatcgcagaccgataccaggatcttgccatcctatggaactgcctcggtgagttttctccttcattacagaaacggctttttcaaaaatatggtattgataatcctgatatgaataaattgcagtttcatttgatgctcgatgagtttttctaagcgtataatggtctagagctagcatatggatccatcgattccattatacgcctgtcagaccaagtttactcatatatactttagattgatttaaaacttcatttttaatttaaaaggatctaggtgaagatcctttttgataatctcatgaccaaaatcccttaacgtgagttttcgttccactgagcgtcagaccccgtagaaaagatcaaaggatcttcttgagatcctttttttctgcgcgtaatctgctgcttgcaaacaaaaaaaccaccgctaccagcggtggtttgtttgccggatcaagagctaccaactctttttccgaaggtaactggcttcagcagagcgcagataccaaatactgttcttctagtgtagccgtagttaggccaccacttcaagaactctgtagcaccgcctacatacctcgctctgctaatcctgttaccagtggctgctgccagtggcgataagtcgtgtcttaccgggttggactcaagacgatagttaccggataaggcgcagcggtcgggctgaacggggggttcgtgcacacagcccagcttggagcgaacgacctacaccgaactgagatacctacagcgtgagctatgagaaagcgccacgcttcccgaagggagaaaggcggacaggtatccggtaagcggcagggtcggaacaggagagcgcacgagggagcttccagggggaaacgcctggtatctttatagtcctgtcgggtttcgccacctctgacttgagcgtcgatttttgtgatgctcgtcaggggggcggagcctatggaaaaacgccagcaacgcggcctttttacggttcctggccttttgctggccttttgctcacatgt

SEQ ID NO: 497 - DNA, 8047 bp, synthetic construct
  source 1..8047: mol_type = other DNA
tctagagctagcatatggatccatcgatttagggataacagggtaattatcagcacacaattgcccattatacgcgcgtataatggactattgtgtgctgatatctgtacacttaagggctagatcttagcttacgtcactagagggtccacgtttagtttttaagatccattgatctcctaaacgctgcaagattcgcaacctggtatacttagcctaggcgctaggtcctagtgcagcgggactttttttctaaagtcgttgagaggaggagtcgtcagaccagatagctttgatgtcctgatcggaaggatcgttggcccccctgcaggcagctgttaattaactgcgcgctcgctcgctcactgaggccgcccgggcaaagcccgggcgtcgggcgacctttggtcgcccggcctcagtgagcgagcgagcgcgcagagagggagtggccaactccatcactaggggttccttgtagttaatgattaacccgccatgctacttatctacggcgcgccacgcgttctaggagttaatttttaaaaagcagtcaaaagtccaagtgcccttgcgagcatttactctctctgtttgctctggttaataatctcaggagcacaaacattccttactagttctaggagttaatttttaaaaagcagtcaaaagtccaagtgcccttgcgagcatttactctctctgtttgctctggttaataatctcaggagcacaaacattccttactagttctagagcggccgccagtgtgctggaattcggcttttttagggctggaagctacctttgacatcatttcctctgcgaatgcatgtataatttctacagaacctattagaaaggatcacccagcctctgcttttgtacaactttcccttaaaaaactgccaatcccactgctgtttggcccaatagtgagaactttttcctgctgcctcttggtgcttttgcctatggcccctattctgcctgctgaagacactcttgccagcatggacttaaacccctccagctctgacaatcctctttctcttttgttttacatgaagggtctggcagccaaagcaatcactcaaagttcaaaccttatcattttttgctttgttcctcttggccttggttttgtacatcagctttgaaaataccatcccagggttaatgctggggttaatttataactgagagtgctctagttctgcaatacaggacatgctataaaaatggaaagatgttgctttctgagagatcaggtggattcttgggcatttgcttaagcttggtaccgccaccatgggggtgaggcaccctccctgttctcacaggctgctggctgtgtgtgctctggtgtctctggccactgctgccctgctggagtttgggctgagctgggtctttctggtggccctgctgaagggagtccagtgtgagcagcagggggccagcaggccaggccccagggatgcccaggcccaccctggcagacccagggctgtgcccacccagtgtgatgtgcctcccaacagcagatttgactgtgcccctgataaggccattactcaggaacagtgtgaggccaggggctgctgctatatccctgccaagcagggcctgcagggggcccagatggggcagccctggtgcttcttcccccccagctacccctcttataagctggagaatctgagcagctctgaaatgggctacactgccactctgaccaggactacccccaccttcttccccaaggatattctgactctgaggctggatgtgatgatggagactgagaacaggctgcacttcaccatcaaggaccctgccaacaggaggtatgaggtgcccctggaaactcccagggtgcactctagggcccccagccccctgtattctgtggagttctctgaggagccttttggggtcattgtccacaggcagctggatggcagggtgctgctgaatactactgtggcccctctgttctttgctgaccagttcctgcagctgagcaccagcctgccttctcagtacattactggcctggctgagcatctgagccccctgatgctgagcacctcttggaccagaatcaccctgtggaacagggacctggctcccactcctggggccaacctgtatggcagccaccccttctacctggccctggaggatgggggctctgcccatggggtgttcctgctgaacagcaatgccatggatgtggtgctgcagccctctcctgccctgtcttggagatctactgggggcatcctggatgtgtatatcttcctggggcctgagcccaagtctgtggtgcagcagtacctggatgtggtgggctaccccttcatgcccccctactggggcctgggcttccacctgtgcaggtggggctactcttctactgctatcaccaggcaggtggtggagaacatgaccagggctcacttccctctggatgtgcagtggaatgacctggactacatggactctaggagagacttcacttttaataaggatgggttcagggactttcctgccatggtgcaggagctgcatcaggggggcaggagatatatgatgattgtggaccctgctatttctagctctggccctgctggcagctataggccctatgatgaggggctgaggaggggggtgttcatcactaatgagactggccagcccctgattggcaaggtgtggcctggctctactgccttccctgatttcaccaaccccactgccctggcctggtgggaggatatggtggctgagtttcatgaccaggtgccctttgatggcatgtggattgacatgaatgagcccagcaactttatcaggggctctgaagatggctgccccaacaatgagctggagaaccccccctatgtgcctggggtggtggggggcaccctgcaggctgccaccatctgtgccagcagccaccagttcctgagcacccactataacctgcacaacctgtatggcctgactgaggccattgcctctcacagggccctggtgaaggctagggggactaggccctttgtgatcagcaggtctacttttgctggccatggcaggtatgctgggcactggactggggatgtgtggtctagctgggagcagctggccagctctgtgcctgagatcctgcagtttaatctgctgggggtgcccctggtgggggctgatgtgtgtggcttcctgggcaatacctctgaggagctgtgtgtgaggtggactcagctgggggctttctaccccttcatgagaaaccacaactctctgctgagcctgccccaggagccctattctttttctgagcctgcccagcaggctatgaggaaggccctgactctgaggtatgccctgctgccccacctgtataccctgttccatcaggcccatgtggctggggagactgtggccagacctctgttcctggagttccccaaggatagctctacttggactgtggaccaccagctgctgtggggggaggctctgctgatcacccctgtgctgcaggctgggaaggctgaggtgactggctatttccccctgggcacctggtatgatctgcagactgtgcccattgaggccctgggctctctgccccctccccctgctgcccccagggagcctgccatccactctgagggccagtgggtgaccctgcctgcccctctggacactatcaatgtgcacctgagggctggctacatcatccccctgcagggccctggcctgactaccactgagtctaggcagcagcccatggccctggctgtggctctgaccaaggggggggaggccaggggggagctgttctgggatgatggggagtctctggaggtgctggagaggggggcctacacccaggtgatcttcctggctaggaataacaccattgtcaatgagctggtgagggtgacctctgagggggctggcctgcagctgcagaaggtgactgtgctgggggtggctactgccccccagcaggtgctgagcaatggggtgcctgtgagcaacttcacctatagccctgacaccaaggtgctggacatctgtgtgagcctgctgatgggggagcagttcctggtgagctggtgctaatttaaatctcgagccgggcggagtgtgttagtctctccagagggaggctggttccccagggaagcagagcctgtgtgcgggcagcagctgtgtgcgggcctgggggttgttaagtgcaattatttttaataaaaggggcatttggaaaaaaaaaaaaaaggtagcagtcgacagatgaattctgcagatctgtggcttctagctgcccgggtggcatccctgtgacccctccccagtgcctctcctggccctggaagttgccactccagtgcccaccagccttgtcctaataaaattaagttgcatcattttgtctgactaggtgtccttctataatattatggggtggaggggggtggtatggagcaaggggcaagttgggaagacaacctgtagggcctgcggggtctattgggaaccaagctggagtgcagtggcacaatcttggctcactgcaatctccgcctcctgggttcaagcgattctcctgcctcagcctcccgagttgttgggattccaggcatgcatgaccaggctcagctaatttttgtttttttggtagagacggggtttcaccatattggccaggctggtctccaactcctaatctcaggtgatctacccaccttggcctcccaaattgctgggattacaggcgtgaaccactgctcccttccctgtccttctgattttaaaaaaaagagaaatgttctggcacctgcacttgcactggggacagcctattttgctagtttgttttgtttcgttttgttttgatggagagcgtatgttgtttaaacgcggccgcgtagataagtagcatggcgggttaatcattaactacaaggaacccctagtgatggagttggccactccctctctgcgcgctcgctcgctcactgaggccgggcgaccaaaggtcgcccgacgcccgggctttgcccgggcggcctcagtgagcgagcgagcgcgcagttaattaaggcgccctaggccgacccttagactctgtactcagttctataaacgagccattggatacgagatccgtagattgataagggacacggaatatccccggacgcaatagacaccggtggacagcttggtatcctgagcacagtcgcgcgtccgaatctagctctactttagaggccccggattctgatggtcgtagaccgcagaaccgattggggggatgagatctactagttatcagcacacaattgcccattatacgcgcgtataatggactattgtgtgctgatatagggataacagggtaattctagagctagcatatggatccatcgatttgatgcggtattttctccttacgcatctgtgcggtatttcacaccgcatacgtcaaagcaaccatagtacgcgccctgtagcggcgcattaagcgcggcgggtgtggtggttacgcgcagcgtgaccgctacacttgccagcgccctagcgcccgctcctttcgctttcttcccttcctttctcgccacgttcgccggctttccccgtcaagctctaaatcgggggctccctttagggttccgatttagtgctttacggcacctcgaccccaaaaaacttgatttgggtgatggttcacgtagtgggccatcgccctgatagacggtttttcgccctttgacgttggagtccacgttctttaatagtggactcttgttccaaactggaacaacactcaactctatctcgggctattcttttgatttataagggattttgccgatttcggtctattggttaaaaaatgagctgatttaacaaaaatttaacgcgaattttaacaaaatattaacgtttacaattttatggtgcactctcagtacaatctgctctgatgccgcatagttaagccagccccgacacccgccaacacccgctgacgcgccctgacgggcttgtctgctcccggcatccgcttacagacaagctgtgaccgtctccgggagctgcatgtgtcagaggttttcaccgtcatcaccgaaacgcgcgagacgaaagggcctcgtgatacgcctatttttataggttaatgtcatgataataatggtttcttagacgtcaggtggcacttttcggggaaatgtgcgcggaacccctatttgtttatttttctaaatacattcaaatatgtatccgctcatgagacaataaccctgataaatgcttcaataatattgaaaaaggaagagtatgagccatattcaacgggaaacgtcgaggccgcgattaaattccaacatggatgctgatttatatgggtataaatgggctcgcgataatgtcgggcaatcaggtgcgacaatctatcgcttgtatgggaagcccgatgcgccagagttgtttctgaaacatggcaaaggtagcgttgccaatgatgttacagatgagatggtcagactaaactggctgacggaatttatgcctcttccgaccatcaagcattttatccgtactcctgatgatgcatggttactcaccactgcgatccccggaaaaacagcattccaggtattagaagaatatcctgattcaggtgaaaatattgttgatgcgctggcagtgttcctgcgccggttgcattcgattcctgtttgtaattgtccttttaacagcgatcgcgtatttcgtctcgctcaggcgcaatcacgaatgaataacggtttggttgatgcgagtgattttgatgacgagcgtaatggctggcctgttgaacaagtctggaaagaaatgcataaacttttgccattctcaccggattcagtcgtcactcatggtgatttctcacttgataaccttatttttgacgaggggaaattaataggttgtattgatgttggacgagtcggaatcgcagaccgataccaggatcttgccatcctatggaactgcctcggtgagttttctccttcattacagaaacggctttttcaaaaatatggtattgataatcctgatatgaataaattgcagtttcatttgatgctcgatgagtttttctaagcgtataatggtctagagctagcatatggatccatcgattccattatacgcctgtcagaccaagtttactcatatatactttagattgatttaaaacttcatttttaatttaaaaggatctaggtgaagatcctttttgataatctcatgaccaaaatcccttaacgtgagttttcgttccactgagcgtcagaccccgtagaaaagatcaaaggatcttcttgagatcctttttttctgcgcgtaatctgctgcttgcaaacaaaaaaaccaccgctaccagcggtggtttgtttgccggatcaagagctaccaactctttttccgaaggtaactggcttcagcagagcgcagataccaaatactgttcttctagtgtagccgtagttaggccaccacttcaagaactctgtagcaccgcctacatacctcgctctgctaatcctgttaccagtggctgctgccagtggcgataagtcgtgtcttaccgggttggactcaagacgatagttaccggataaggcgcagcggtcgggctgaacggggggttcgtgcacacagcccagcttggagcgaacgacctacaccgaactgagatacctacagcgtgagctatgagaaagcgccacgcttcccgaagggagaaaggcggacaggtatccggtaagcggcagggtcggaacaggagagcgcacgagggagcttccagggggaaacgcctggtatctttatagtcctgtcgggtttcgccacctctgacttgagcgtcgatttttgtgatgctcgtcaggggggcggagcctatggaaaaacgccagcaacgcggcctttttacggttcctggccttttgctggccttttgctcacatgt

SEQ ID NO: 498 - DNA, 8050 bp, synthetic construct
  source 1..8050: mol_type = other DNA
tctagagctagcatatggatccatcgatttagggataacagggtaattatcagcacacaattgcccattatacgcgcgtataatggactattgtgtgctgatatctgtacacttaagggctagatcttagcttacgtcactagagggtccacgtttagtttttaagatccattgatctcctaaacgctgcaagattcgcaacctggtatacttagcctaggcgctaggtcctagtgcagcgggactttttttctaaagtcgttgagaggaggagtcgtcagaccagatagctttgatgtcctgatcggaaggatcgttggcccccctgcaggcagctgttaattaactgcgcgctcgctcgctcactgaggccgcccgggcaaagcccgggcgtcgggcgacctttggtcgcccggcctcagtgagcgagcgagcgcgcagagagggagtggccaactccatcactaggggttccttgtagttaatgattaacccgccatgctacttatctacggcgcgccacgcgttctaggagttaatttttaaaaagcagtcaaaagtccaagtgcccttgcgagcatttactctctctgtttgctctggttaataatctcaggagcacaaacattccttactagttctaggagttaatttttaaaaagcagtcaaaagtccaagtgcccttgcgagcatttactctctctgtttgctctggttaataatctcaggagcacaaacattccttactagttctagagcggccgccagtgtgctggaattcggcttttttagggctggaagctacctttgacatcatttcctctgcgaatgcatgtataatttctacagaacctattagaaaggatcacccagcctctgcttttgtacaactttcccttaaaaaactgccaatcccactgctgtttggcccaatagtgagaactttttcctgctgcctcttggtgcttttgcctatggcccctattctgcctgctgaagacactcttgccagcatggacttaaacccctccagctctgacaatcctctttctcttttgttttacatgaagggtctggcagccaaagcaatcactcaaagttcaaaccttatcattttttgctttgttcctcttggccttggttttgtacatcagctttgaaaataccatcccagggttaatgctggggttaatttataactgagagtgctctagttctgcaatacaggacatgctataaaaatggaaagatgttgctttctgagagatcaggtggattcttgggcatttgcttaagcttggtaccgccaccatgggggtgaggcaccctccctgttctcacaggctgctggctgtgtgtgctctggtgtctctggccactgctgccctgctgtacagaatgcagctgctgtcctgcattgcactgtcactggcactggttaccaactcacagcagggagcttctagacctggacctagagatgctcaggctcatcctggaagacctagagctgtgcctacacagtgtgatgtgcctcctaattctagatttgattgtgctcctgataaggctataacacaggagcagtgtgaggctagaggatgttgttatattcctgctaagcagggactgcagggagctcagatgggacagccttggtgtttttttcctccttcttatccttcttataagctggagaatctgtcttcttctgagatgggatatacagctacactgacaagaacaacacctacattttttcctaaggatattctgacactgagactggatgtgatgatggagacagagaatagactgcattttacaattaaggatcctgctaatagaagatatgaggtgcctctagagacacctagagtgcattctagagctccttctcctctgtattctgtggagttttctgaggagccttttggagtgattgtgcatagacagctggatggaagagtgctgctgaatacaacagtggctcctctgttttttgctgatcagtttctgcagctgtctacatctctgccttctcagtatattacaggactggctgagcatctgtctcctctgatgctgtctacatcttggacaagaattacactgtggaatagagatctggctcctacacctggagctaatctgtatggatctcatcctttttatctggctctggaggatggaggatctgctcatggagtgtttctgctgaattctaatgctatggatgtagtgctgcagccttctcctgctctgtcttggagatctacaggaggaattctggatgtgtatatttttctaggacctgagcctaagtctgtggtgcagcagtatctggatgtagtgggatatccttttatgcctccttattggggactgggatttcatctgtgtagatggggatattcttctacagctattacaagacaggtggttgagaatatgacaagagctcattttcctctggatgtgcagtggaatgatctagattatatggattctagaagagattttacatttaataaggatggatttagagattttcctgctatggtgcaggagctgcatcagggaggaagaagatatatgatgattgtggatcctgctatttcttcttctggacctgctggatcttatagaccttatgatgagggactgagaagaggagtgtttattacaaatgagacaggacagcctctgattggaaaggtgtggcctggatctacagcttttcctgattttacaaatcctacagctctggcttggtgggaggatatggtggctgagtttcatgatcaggtgccttttgatggaatgtggattgatatgaatgagccttctaattttataagaggatctgaggatggatgtcctaataatgagctagagaatcctccttatgtgcctggagtagtgggaggaacactgcaggctgctacaatttgtgcttcttctcatcagtttctgtctacacattataatctgcataatctgtatggactgacagaggctattgcttctcatagagctctggtgaaggctagaggaacaagaccttttgtgatttctagatctacatttgctggacatggaagatatgctggacattggacaggagatgtatggtcttcttgggagcagctagcttcttctgtgcctgagattctgcagtttaatctgctaggagtgcctctggtgggagctgatgtgtgtggatttctgggaaatacatctgaggagctgtgtgtgagatggacacagctgggagctttttatccttttatgagaaatcataattctctgctgtctctgcctcaggagccttattctttttctgagcctgctcagcaggctatgagaaaggctctgacactgagatatgctctgctgcctcatctgtatacactgtttcatcaggctcatgtggctggagagacagtagctagacctctgtttctggagtttcctaaggattcttctacatggacagttgatcatcagctgctgtggggagaggctctgctgattacacctgtgctgcaggctggaaaggctgaggtgacaggatattttcctctgggaacatggtatgatctgcagacagtgcctatagaggctctgggatctctgcctcctcctcctgctgctcctagagagcctgctattcattctgagggacagtgggtgacactgcctgctcctctggatacaattaatgtgcatctgagagctggatatattattcctctgcagggacctggactgacaacaacagagtctagacagcagcctatggctctggctgtggctctgacaaagggaggagaggctagaggagagctgttttgggatgatggagagtctctggaggtgctggagagaggagcttatacacaggtgatttttctggctagaaataatacaattgtgaatgagctggtgagagtgacatctgagggagctggactgcagctgcagaaggtgacagtgctgggagtggctacagctcctcagcaggtgctgtctaatggagtgcctgtgtctaattttacatattctcctgatacaaaggtgctggatatttgtgtgtctctgctgatgggagagcagtttctggtgtcttggtgttaatgatttaaatctcgagccgggcggagtgtgttagtctctccagagggaggctggttccccagggaagcagagcctgtgtgcgggcagcagctgtgtgcgggcctgggggttgttaagtgcaattatttttaataaaaggggcatttggaaaaaaaaaaaaaaggtagcagtcgacagatgaattctgcagatctgtggcttctagctgcccgggtggcatccctgtgacccctccccagtgcctctcctggccctggaagttgccactccagtgcccaccagccttgtcctaataaaattaagttgcatcattttgtctgactaggtgtccttctataatattatggggtggaggggggtggtatggagcaaggggcaagttgggaagacaacctgtagggcctgcggggtctattgggaaccaagctggagtgcagtggcacaatcttggctcactgcaatctccgcctcctgggttcaagcgattctcctgcctcagcctcccgagttgttgggattccaggcatgcatgaccaggctcagctaatttttgtttttttggtagagacggggtttcaccatattggccaggctggtctccaactcctaatctcaggtgatctacccaccttggcctcccaaattgctgggattacaggcgtgaaccactgctcccttccctgtccttctgattttaaaaaaaagagaaatgttctggcacctgcacttgcactggggacagcctattttgctagtttgttttgtttcgttttgttttgatggagagcgtatgttgtttaaacgcggccgcgtagataagtagcatggcgggttaatcattaactacaaggaacccctagtgatggagttggccactccctctctgcgcgctcgctcgctcactgaggccgggcgaccaaaggtcgcccgacgcccgggctttgcccgggcggcctcagtgagcgagcgagcgcgcagttaattaaggcgccctaggccgacccttagactctgtactcagttctataaacgagccattggatacgagatccgtagattgataagggacacggaatatccccggacgcaatagacaccggtggacagcttggtatcctgagcacagtcgcgcgtccgaatctagctctactttagaggccccggattctgatggtcgtagaccgcagaaccgattggggggatgagatctactagttatcagcacacaattgcccattatacgcgcgtataatggactattgtgtgctgatatagggataacagggtaattctagagctagcatatggatccatcgatttgatgcggtattttctccttacgcatctgtgcggtatttcacaccgcatacgtcaaagcaaccatagtacgcgccctgtagcggcgcattaagcgcggcgggtgtggtggttacgcgcagcgtgaccgctacacttgccagcgccctagcgcccgctcctttcgctttcttcccttcctttctcgccacgttcgccggctttccccgtcaagctctaaatcgggggctccctttagggttccgatttagtgctttacggcacctcgaccccaaaaaacttgatttgggtgatggttcacgtagtgggccatcgccctgatagacggtttttcgccctttgacgttggagtccacgttctttaatagtggactcttgttccaaactggaacaacactcaactctatctcgggctattcttttgatttataagggattttgccgatttcggtctattggttaaaaaatgagctgatttaacaaaaatttaacgcgaattttaacaaaatattaacgtttacaattttatggtgcactctcagtacaatctgctctgatgccgcatagttaagccagccccgacacccgccaacacccgctgacgcgccctgacgggcttgtctgctcccggcatccgcttacagacaagctgtgaccgtctccgggagctgcatgtgtcagaggttttcaccgtcatcaccgaaacgcgcgagacgaaagggcctcgtgatacgcctatttttataggttaatgtcatgataataatggtttcttagacgtcaggtggcacttttcggggaaatgtgcgcggaacccctatttgtttatttttctaaatacattcaaatatgtatccgctcatgagacaataaccctgataaatgcttcaataatattgaaaaaggaagagtatgagccatattcaacgggaaacgtcgaggccgcgattaaattccaacatggatgctgatttatatgggtataaatgggctcgcgataatgtcgggcaatcaggtgcgacaatctatcgcttgtatgggaagcccgatgcgccagagttgtttctgaaacatggcaaaggtagcgttgccaatgatgttacagatgagatggtcagactaaactggctgacggaatttatgcctcttccgaccatcaagcattttatccgtactcctgatgatgcatggttactcaccactgcgatccccggaaaaacagcattccaggtattagaagaatatcctgattcaggtgaaaatattgttgatgcgctggcagtgttcctgcgccggttgcattcgattcctgtttgtaattgtccttttaacagcgatcgcgtatttcgtctcgctcaggcgcaatcacgaatgaataacggtttggttgatgcgagtgattttgatgacgagcgtaatggctggcctgttgaacaagtctggaaagaaatgcataaacttttgccattctcaccggattcagtcgtcactcatggtgatttctcacttgataaccttatttttgacgaggggaaattaataggttgtattgatgttggacgagtcggaatcgcagaccgataccaggatcttgccatcctatggaactgcctcggtgagttttctccttcattacagaaacggctttttcaaaaatatggtattgataatcctgatatgaataaattgcagtttcatttgatgctcgatgagtttttctaagcgtataatggtctagagctagcatatggatccatcgattccattatacgcctgtcagaccaagtttactcatatatactttagattgatttaaaacttcatttttaatttaaaaggatctaggtgaagatcctttttgataatctcatgaccaaaatcccttaacgtgagttttcgttccactgagcgtcagaccccgtagaaaagatcaaaggatcttcttgagatcctttttttctgcgcgtaatctgctgcttgcaaacaaaaaaaccaccgctaccagcggtggtttgtttgccggatcaagagctaccaactctttttccgaaggtaactggcttcagcagagcgcagataccaaatactgttcttctagtgtagccgtagttaggccaccacttcaagaactctgtagcaccgcctacatacctcgctctgctaatcctgttaccagtggctgctgccagtggcgataagtcgtgtcttaccgggttggactcaagacgatagttaccggataaggcgcagcggtcgggctgaacggggggttcgtgcacacagcccagcttggagcgaacgacctacaccgaactgagatacctacagcgtgagctatgagaaagcgccacgcttcccgaagggagaaaggcggacaggtatccggtaagcggcagggtcggaacaggagagcgcacgagggagcttccagggggaaacgcctggtatctttatagtcctgtcgggtttcgccacctctgacttgagcgtcgatttttgtgatgctcgtcaggggggcggagcctatggaaaaacgccagcaacgcggcctttttacggttcctggccttttgctggccttttgctcacatgt

SEQ ID NO: 499 - DNA, 8050 bp, synthetic construct
  source 1..8050: mol_type = other DNA
tctagagctagcatatggatccatcgatttagggataacagggtaattatcagcacacaattgcccattatacgcgcgtataatggactattgtgtgctgatatctgtacacttaagggctagatcttagcttacgtcactagagggtccacgtttagtttttaagatccattgatctcctaaacgctgcaagattcgcaacctggtatacttagcctaggcgctaggtcctagtgcagcgggactttttttctaaagtcgttgagaggaggagtcgtcagaccagatagctttgatgtcctgatcggaaggatcgttggcccccctgcaggcagctgttaattaactgcgcgctcgctcgctcactgaggccgcccgggcaaagcccgggcgtcgggcgacctttggtcgcccggcctcagtgagcgagcgagcgcgcagagagggagtggccaactccatcactaggggttccttgtagttaatgattaacccgccatgctacttatctacggcgcgccacgcgttctaggagttaatttttaaaaagcagtcaaaagtccaagtgcccttgcgagcatttactctctctgtttgctctggttaataatctcaggagcacaaacattccttactagttctaggagttaatttttaaaaagcagtcaaaagtccaagtgcccttgcgagcatttactctctctgtttgctctggttaataatctcaggagcacaaacattccttactagttctagagcggccgccagtgtgctggaattcggcttttttagggctggaagctacctttgacatcatttcctctgcgaatgcatgtataatttctacagaacctattagaaaggatcacccagcctctgcttttgtacaactttcccttaaaaaactgccaatcccactgctgtttggcccaatagtgagaactttttcctgctgcctcttggtgcttttgcctatggcccctattctgcctgctgaagacactcttgccagcatggacttaaacccctccagctctgacaatcctctttctcttttgttttacatgaagggtctggcagccaaagcaatcactcaaagttcaaaccttatcattttttgctttgttcctcttggccttggttttgtacatcagctttgaaaataccatcccagggttaatgctggggttaatttataactgagagtgctctagttctgcaatacaggacatgctataaaaatggaaagatgttgctttctgagagatcaggtggattcttgggcatttgcttaagcttggtaccgccaccatgggggtgaggcaccctccctgttctcacaggctgctggctgtgtgtgctctggtgtctctggccactgctgccctgctggagtttgggctgagctgggtctttctggtggccctgctgaagggagtccagtgtgagcagcagggagcttctagacctggacctagagatgctcaggctcatcctggaagacctagagctgtgcctacacagtgtgatgtgcctcctaattctagatttgattgtgctcctgataaggctataacacaggagcagtgtgaggctagaggatgttgttatattcctgctaagcagggactgcagggagctcagatgggacagccttggtgtttttttcctccttcttatccttcttataagctggagaatctgtcttcttctgagatgggatatacagctacactgacaagaacaacacctacattttttcctaaggatattctgacactgagactggatgtgatgatggagacagagaatagactgcattttacaattaaggatcctgctaatagaagatatgaggtgcctctagagacacctagagtgcattctagagctccttctcctctgtattctgtggagttttctgaggagccttttggagtgattgtgcatagacagctggatggaagagtgctgctgaatacaacagtggctcctctgttttttgctgatcagtttctgcagctgtctacatctctgccttctcagtatattacaggactggctgagcatctgtctcctctgatgctgtctacatcttggacaagaattacactgtggaatagagatctggctcctacacctggagctaatctgtatggatctcatcctttttatctggctctggaggatggaggatctgctcatggagtgtttctgctgaattctaatgctatggatgtagtgctgcagccttctcctgctctgtcttggagatctacaggaggaattctggatgtgtatatttttctaggacctgagcctaagtctgtggtgcagcagtatctggatgtagtgggatatccttttatgcctccttattggggactgggatttcatctgtgtagatggggatattcttctacagctattacaagacaggtggttgagaatatgacaagagctcattttcctctggatgtgcagtggaatgatctagattatatggattctagaagagattttacatttaataaggatggatttagagattttcctgctatggtgcaggagctgcatcagggaggaagaagatatatgatgattgtggatcctgctatttcttcttctggacctgctggatcttatagaccttatgatgagggactgagaagaggagtgtttattacaaatgagacaggacagcctctgattggaaaggtgtggcctggatctacagcttttcctgattttacaaatcctacagctctggcttggtgggaggatatggtggctgagtttcatgatcaggtgccttttgatggaatgtggattgatatgaatgagccttctaattttataagaggatctgaggatggatgtcctaataatgagctagagaatcctccttatgtgcctggagtagtgggaggaacactgcaggctgctacaatttgtgcttcttctcatcagtttctgtctacacattataatctgcataatctgtatggactgacagaggctattgcttctcatagagctctggtgaaggctagaggaacaagaccttttgtgatttctagatctacatttgctggacatggaagatatgctggacattggacaggagatgtatggtcttcttgggagcagctagcttcttctgtgcctgagattctgcagtttaatctgctaggagtgcctctggtgggagctgatgtgtgtggatttctgggaaatacatctgaggagctgtgtgtgagatggacacagctgggagctttttatccttttatgagaaatcataattctctgctgtctctgcctcaggagccttattctttttctgagcctgctcagcaggctatgagaaaggctctgacactgagatatgctctgctgcctcatctgtatacactgtttcatcaggctcatgtggctggagagacagtagctagacctctgtttctggagtttcctaaggattcttctacatggacagttgatcatcagctgctgtggggagaggctctgctgattacacctgtgctgcaggctggaaaggctgaggtgacaggatattttcctctgggaacatggtatgatctgcagacagtgcctatagaggctctgggatctctgcctcctcctcctgctgctcctagagagcctgctattcattctgagggacagtgggtgacactgcctgctcctctggatacaattaatgtgcatctgagagctggatatattattcctctgcagggacctggactgacaacaacagagtctagacagcagcctatggctctggctgtggctctgacaaagggaggagaggctagaggagagctgttttgggatgatggagagtctctggaggtgctggagagaggagcttatacacaggtgatttttctggctagaaataatacaattgtgaatgagctggtgagagtgacatctgagggagctggactgcagctgcagaaggtgacagtgctgggagtggctacagctcctcagcaggtgctgtctaatggagtgcctgtgtctaattttacatattctcctgatacaaaggtgctggatatttgtgtgtctctgctgatgggagagcagtttctggtgtcttggtgttaatgatttaaatctcgagccgggcggagtgtgttagtctctccagagggaggctggttccccagggaagcagagcctgtgtgcgggcagcagctgtgtgcgggcctgggggttgttaagtgcaattatttttaataaaaggggcatttggaaaaaaaaaaaaaaggtagcagtcgacagatgaattctgcagatctgtggcttctagctgcccgggtggcatccctgtgacccctccccagtgcctctcctggccctggaagttgccactccagtgcccaccagccttgtcctaataaaattaagttgcatcattttgtctgactaggtgtccttctataatattatggggtggaggggggtggtatggagcaaggggcaagttgggaagacaacctgtagggcctgcggggtctattgggaaccaagctggagtgcagtggcacaatcttggctcactgcaatctccgcctcctgggttcaagcgattctcctgcctcagcctcccgagttgttgggattccaggcatgcatgaccaggctcagctaatttttgtttttttggtagagacggggtttcaccatattggccaggctggtctccaactcctaatctcaggtgatctacccaccttggcctcccaaattgctgggattacaggcgtgaaccactgctcccttccctgtccttctgattttaaaaaaaagagaaatgttctggcacctgcacttgcactggggacagcctattttgctagtttgttttgtttcgttttgttttgatggagagcgtatgttgtttaaacgcggccgcgtagataagtagcatggcgggttaatcattaactacaaggaacccctagtgatggagttggccactccctctctgcgcgctcgctcgctcactgaggccgggcgaccaaaggtcgcccgacgcccgggctttgcccgggcggcctcagtgagcgagcgagcgcgcagttaattaaggcgccctaggccgacccttagactctgtactcagttctataaacgagccattggatacgagatccgtagattgataagggacacggaatatccccggacgcaatagacaccggtggacagcttggtatcctgagcacagtcgcgcgtccgaatctagctctactttagaggccccggattctgatggtcgtagaccgcagaaccgattggggggatgagatctactagttatcagcacacaattgcccattatacgcgcgtataatggactattgtgtgctgatatagggataacagggtaattctagagctagcatatggatccatcgatttgatgcggtattttctccttacgcatctgtgcggtatttcacaccgcatacgtcaaagcaaccatagtacgcgccctgtagcggcgcattaagcgcggcgggtgtggtggttacgcgcagcgtgaccgctacacttgccagcgccctagcgcccgctcctttcgctttcttcccttcctttctcgccacgttcgccggctttccccgtcaagctctaaatcgggggctccctttagggttccgatttagtgctttacggcacctcgaccccaaaaaacttgatttgggtgatggttcacgtagtgggccatcgccctgatagacggtttttcgccctttgacgttggagtccacgttctttaatagtggactcttgttccaaactggaacaacactcaactctatctcgggctattcttttgatttataagggattttgccgatttcggtctattggttaaaaaatgagctgatttaacaaaaatttaacgcgaattttaacaaaatattaacgtttacaattttatggtgcactctcagtacaatctgctctgatgccgcatagttaagccagccccgacacccgccaacacccgctgacgcgccctgacgggcttgtctgctcccggcatccgcttacagacaagctgtgaccgtctccgggagctgcatgtgtcagaggttttcaccgtcatcaccgaaacgcgcgagacgaaagggcctcgtgatacgcctatttttataggttaatgtcatgataataatggtttcttagacgtcaggtggcacttttcggggaaatgtgcgcggaacccctatttgtttatttttctaaatacattcaaatatgtatccgctcatgagacaataaccctgataaatgcttcaataatattgaaaaaggaagagtatgagccatattcaacgggaaacgtcgaggccgcgattaaattccaacatggatgctgatttatatgggtataaatgggctcgcgataatgtcgggcaatcaggtgcgacaatctatcgcttgtatgggaagcccgatgcgccagagttgtttctgaaacatggcaaaggtagcgttgccaatgatgttacagatgagatggtcagactaaactggctgacggaatttatgcctcttccgaccatcaagcattttatccgtactcctgatgatgcatggttactcaccactgcgatccccggaaaaacagcattccaggtattagaagaatatcctgattcaggtgaaaatattgttgatgcgctggcagtgttcctgcgccggttgcattcgattcctgtttgtaattgtccttttaacagcgatcgcgtatttcgtctcgctcaggcgcaatcacgaatgaataacggtttggttgatgcgagtgattttgatgacgagcgtaatggctggcctgttgaacaagtctggaaagaaatgcataaacttttgccattctcaccggattcagtcgtcactcatggtgatttctcacttgataaccttatttttgacgaggggaaattaataggttgtattgatgttggacgagtcggaatcgcagaccgataccaggatcttgccatcctatggaactgcctcggtgagttttctccttcattacagaaacggctttttcaaaaatatggtattgataatcctgatatgaataaattgcagtttcatttgatgctcgatgagtttttctaagcgtataatggtctagagctagcatatggatccatcgattccattatacgcctgtcagaccaagtttactcatatatactttagattgatttaaaacttcatttttaatttaaaaggatctaggtgaagatcctttttgataatctcatgaccaaaatcccttaacgtgagttttcgttccactgagcgtcagaccccgtagaaaagatcaaaggatcttcttgagatcctttttttctgcgcgtaatctgctgcttgcaaacaaaaaaaccaccgctaccagcggtggtttgtttgccggatcaagagctaccaactctttttccgaaggtaactggcttcagcagagcgcagataccaaatactgttcttctagtgtagccgtagttaggccaccacttcaagaactctgtagcaccgcctacatacctcgctctgctaatcctgttaccagtggctgctgccagtggcgataagtcgtgtcttaccgggttggactcaagacgatagttaccggataaggcgcagcggtcgggctgaacggggggttcgtgcacacagcccagcttggagcgaacgacctacaccgaactgagatacctacagcgtgagctatgagaaagcgccacgcttcccgaagggagaaaggcggacaggtatccggtaagcggcagggtcggaacaggagagcgcacgagggagcttccagggggaaacgcctggtatctttatagtcctgtcgggtttcgccacctctgacttgagcgtcgatttttgtgatgctcgtcaggggggcggagcctatggaaaaacgccagcaacgcggcctttttacggttcctggccttttgctggccttttgctcacatgt

SEQ ID NO: 500 - DNA, 7981 bp, synthetic construct
  source 1..7981: mol_type = other DNA
tctagagctagcatatggatccatcgatttagggataacagggtaattatcagcacacaattgcccattatacgcgcgtataatggactattgtgtgctgatatctgtacacttaagggctagatcttagcttacgtcactagagggtccacgtttagtttttaagatccattgatctcctaaacgctgcaagattcgcaacctggtatacttagcctaggcgctaggtcctagtgcagcgggactttttttctaaagtcgttgagaggaggagtcgtcagaccagatagctttgatgtcctgatcggaaggatcgttggcccccctgcaggcagctgttaattaactgcgcgctcgctcgctcactgaggccgcccgggcaaagcccgggcgtcgggcgacctttggtcgcccggcctcagtgagcgagcgagcgcgcagagagggagtggccaactccatcactaggggttccttgtagttaatgattaacccgccatgctacttatctacggcgcgccacgcgttctaggagttaatttttaaaaagcagtcaaaagtccaagtgcccttgcgagcatttactctctctgtttgctctggttaataatctcaggagcacaaacattccttactagttctaggagttaatttttaaaaagcagtcaaaagtccaagtgcccttgcgagcatttactctctctgtttgctctggttaataatctcaggagcacaaacattccttactagttctagagcggccgccagtgtgctggaattcggcttttttagggctggaagctacctttgacatcatttcctctgcgaatgcatgtataatttctacagaacctattagaaaggatcacccagcctctgcttttgtacaactttcccttaaaaaactgccaatcccactgctgtttggcccaatagtgagaactttttcctgctgcctcttggtgcttttgcctatggcccctattctgcctgctgaagacactcttgccagcatggacttaaacccctccagctctgacaatcctctttctcttttgttttacatgaagggtctggcagccaaagcaatcactcaaagttcaaaccttatcattttttgctttgttcctcttggccttggttttgtacatcagctttgaaaataccatcccagggttaatgctggggttaatttataactgagagtgctctagttctgcaatacaggacatgctataaaaatggaaagatgttgctttctgagagatcaggtggattcttgggcatttgcttaagcttggtaccgccaccatgggggtgaggcaccctccctgttctcacaggctgctggctgtgtgtgctctggtgtctctggccactgctcagcagggggccagcaggccaggccccagggatgcccaggcccaccctggcagacccagggctgtgcccacccagtgtgatgtgcctcccaacagcagatttgactgtgcccctgataaggccattactcaggaacagtgtgaggccaggggctgctgctatatccctgccaagcagggcctgcagggggcccagatggggcagccctggtgcttcttcccccccagctacccctcttataagctggagaatctgagcagctctgaaatgggctacactgccactctgaccaggactacccccaccttcttccccaaggatattctgactctgaggctggatgtgatgatggagactgagaacaggctgcacttcaccatcaaggaccctgccaacaggaggtatgaggtgcccctggaaactcccagggtgcactctagggcccccagccccctgtattctgtggagttctctgaggagccttttggggtcattgtccacaggcagctggatggcagggtgctgctgaatactactgtggcccctctgttctttgctgaccagttcctgcagctgagcaccagcctgccttctcagtacattactggcctggctgagcatctgagccccctgatgctgagcacctcttggaccagaatcaccctgtggaacagggacctggctcccactcctggggccaacctgtatggcagccaccccttctacctggccctggaggatgggggctctgcccatggggtgttcctgctgaacagcaatgccatggatgtggtgctgcagccctctcctgccctgtcttggagatctactgggggcatcctggatgtgtatatcttcctggggcctgagcccaagtctgtggtgcagcagtacctggatgtggtgggctaccccttcatgcccccctactggggcctgggcttccacctgtgcaggtggggctactcttctactgctatcaccaggcaggtggtggagaacatgaccagggctcacttccctctggatgtgcagtggaatgacctggactacatggactctaggagagacttcacttttaataaggatgggttcagggactttcctgccatggtgcaggagctgcatcaggggggcaggagatatatgatgattgtggaccctgctatttctagctctggccctgctggcagctataggccctatgatgaggggctgaggaggggggtgttcatcactaatgagactggccagcccctgattggcaaggtgtggcctggctctactgccttccctgatttcaccaaccccactgccctggcctggtgggaggatatggtggctgagtttcatgaccaggtgccctttgatggcatgtggattgacatgaatgagcccagcaactttatcaggggctctgaagatggctgccccaacaatgagctggagaaccccccctatgtgcctggggtggtggggggcaccctgcaggctgccaccatctgtgccagcagccaccagttcctgagcacccactataacctgcacaacctgtatggcctgactgaggccattgcctctcacagggccctggtgaaggctagggggactaggccctttgtgatcagcaggtctacttttgctggccatggcaggtatgctgggcactggactggggatgtgtggtctagctgggagcagctggccagctctgtgcctgagatcctgcagtttaatctgctgggggtgcccctggtgggggctgatgtgtgtggcttcctgggcaatacctctgaggagctgtgtgtgaggtggactcagctgggggctttctaccccttcatgagaaaccacaactctctgctgagcctgccccaggagccctattctttttctgagcctgcccagcaggctatgaggaaggccctgactctgaggtatgccctgctgccccacctgtataccctgttccatcaggcccatgtggctggggagactgtggccagacctctgttcctggagttccccaaggatagctctacttggactgtggaccaccagctgctgtggggggaggctctgctgatcacccctgtgctgcaggctgggaaggctgaggtgactggctatttccccctgggcacctggtatgatctgcagactgtgcccattgaggccctgggctctctgccccctccccctgctgcccccagggagcctgccatccactctgagggccagtgggtgaccctgcctgcccctctggacactatcaatgtgcacctgagggctggctacatcatccccctgcagggccctggcctgactaccactgagtctaggcagcagcccatggccctggctgtggctctgaccaaggggggggaggccaggggggagctgttctgggatgatggggagtctctggaggtgctggagaggggggcctacacccaggtgatcttcctggctaggaataacaccattgtcaatgagctggtgagggtgacctctgagggggctggcctgcagctgcagaaggtgactgtgctgggggtggctactgccccccagcaggtgctgagcaatggggtgcctgtgagcaacttcacctatagccctgacaccaaggtgctggacatctgtgtgagcctgctgatgggggagcagttcctggtgagctggtgctaatttaaatctcgagccgggcggagtgtgttagtctctccagagggaggctggttccccagggaagcagagcctgtgtgcgggcagcagctgtgtgcgggcctgggggttgttaagtgcaattatttttaataaaaggggcatttggaaaaaaaaaaaaaaggtagcagtcgacagatgaattctgcagatctgtggcttctagctgcccgggtggcatccctgtgacccctccccagtgcctctcctggccctggaagttgccactccagtgcccaccagccttgtcctaataaaattaagttgcatcattttgtctgactaggtgtccttctataatattatggggtggaggggggtggtatggagcaaggggcaagttgggaagacaacctgtagggcctgcggggtctattgggaaccaagctggagtgcagtggcacaatcttggctcactgcaatctccgcctcctgggttcaagcgattctcctgcctcagcctcccgagttgttgggattccaggcatgcatgaccaggctcagctaatttttgtttttttggtagagacggggtttcaccatattggccaggctggtctccaactcctaatctcaggtgatctacccaccttggcctcccaaattgctgggattacaggcgtgaaccactgctcccttccctgtccttctgattttaaaaaaaagagaaatgttctggcacctgcacttgcactggggacagcctattttgctagtttgttttgtttcgttttgttttgatggagagcgtatgttgtttaaacgcggccgcgtagataagtagcatggcgggttaatcattaactacaaggaacccctagtgatggagttggccactccctctctgcgcgctcgctcgctcactgaggccgggcgaccaaaggtcgcccgacgcccgggctttgcccgggcggcctcagtgagcgagcgagcgcgcagttaattaaggcgccctaggccgacccttagactctgtactcagttctataaacgagccattggatacgagatccgtagattgataagggacacggaatatccccggacgcaatagacaccggtggacagcttggtatcctgagcacagtcgcgcgtccgaatctagctctactttagaggccccggattctgatggtcgtagaccgcagaaccgattggggggatgagatctactagttatcagcacacaattgcccattatacgcgcgtataatggactattgtgtgctgatatagggataacagggtaattctagagctagcatatggatccatcgatttgatgcggtattttctccttacgcatctgtgcggtatttcacaccgcatacgtcaaagcaaccatagtacgcgccctgtagcggcgcattaagcgcggcgggtgtggtggttacgcgcagcgtgaccgctacacttgccagcgccctagcgcccgctcctttcgctttcttcccttcctttctcgccacgttcgccggctttccccgtcaagctctaaatcgggggctccctttagggttccgatttagtgctttacggcacctcgaccccaaaaaacttgatttgggtgatggttcacgtagtgggccatcgccctgatagacggtttttcgccctttgacgttggagtccacgttctttaatagtggactcttgttccaaactggaacaacactcaactctatctcgggctattcttttgatttataagggattttgccgatttcggtctattggttaaaaaatgagctgatttaacaaaaatttaacgcgaattttaacaaaatattaacgtttacaattttatggtgcactctcagtacaatctgctctgatgccgcatagttaagccagccccgacacccgccaacacccgctgacgcgccctgacgggcttgtctgctcccggcatccgcttacagacaagctgtgaccgtctccgggagctgcatgtgtcagaggttttcaccgtcatcaccgaaacgcgcgagacgaaagggcctcgtgatacgcctatttttataggttaatgtcatgataataatggtttcttagacgtcaggtggcacttttcggggaaatgtgcgcggaacccctatttgtttatttttctaaatacattcaaatatgtatccgctcatgagacaataaccctgataaatgcttcaataatattgaaaaaggaagagtatgagccatattcaacgggaaacgtcgaggccgcgattaaattccaacatggatgctgatttatatgggtataaatgggctcgcgataatgtcgggcaatcaggtgcgacaatctatcgcttgtatgggaagcccgatgcgccagagttgtttctgaaacatggcaaaggtagcgttgccaatgatgttacagatgagatggtcagactaaactggctgacggaatttatgcctcttccgaccatcaagcattttatccgtactcctgatgatgcatggttactcaccactgcgatccccggaaaaacagcattccaggtattagaagaatatcctgattcaggtgaaaatattgttgatgcgctggcagtgttcctgcgccggttgcattcgattcctgtttgtaattgtccttttaacagcgatcgcgtatttcgtctcgctcaggcgcaatcacgaatgaataacggtttggttgatgcgagtgattttgatgacgagcgtaatggctggcctgttgaacaagtctggaaagaaatgcataaacttttgccattctcaccggattcagtcgtcactcatggtgatttctcacttgataaccttatttttgacgaggggaaattaataggttgtattgatgttggacgagtcggaatcgcagaccgataccaggatcttgccatcctatggaactgcctcggtgagttttctccttcattacagaaacggctttttcaaaaatatggtattgataatcctgatatgaataaattgcagtttcatttgatgctcgatgagtttttctaagcgtataatggtctagagctagcatatggatccatcgattccattatacgcctgtcagaccaagtttactcatatatactttagattgatttaaaacttcatttttaatttaaaaggatctaggtgaagatcctttttgataatctcatgaccaaaatcccttaacgtgagttttcgttccactgagcgtcagaccccgtagaaaagatcaaaggatcttcttgagatcctttttttctgcgcgtaatctgctgcttgcaaacaaaaaaaccaccgctaccagcggtggtttgtttgccggatcaagagctaccaactctttttccgaaggtaactggcttcagcagagcgcagataccaaatactgttcttctagtgtagccgtagttaggccaccacttcaagaactctgtagcaccgcctacatacctcgctctgctaatcctgttaccagtggctgctgccagtggcgataagtcgtgtcttaccgggttggactcaagacgatagttaccggataaggcgcagcggtcgggctgaacggggggttcgtgcacacagcccagcttggagcgaacgacctacaccgaactgagatacctacagcgtgagctatgagaaagcgccacgcttcccgaagggagaaaggcggacaggtatccggtaagcggcagggtcggaacaggagagcgcacgagggagcttccagggggaaacgcctggtatctttatagtcctgtcgggtttcgccacctctgacttgagcgtcgatttttgtgatgctcgtcaggggggcggagcctatggaaaaacgccagcaacgcggcctttttacggttcctggccttttgctggccttttgctcacatgt

SEQ ID NO: 501 - DNA, 7984 bp, synthetic construct
  source 1..7984: mol_type = other DNA
tctagagctagcatatggatccatcgatttagggataacagggtaattatcagcacacaattgcccattatacgcgcgtataatggactattgtgtgctgatatctgtacacttaagggctagatcttagcttacgtcactagagggtccacgtttagtttttaagatccattgatctcctaaacgctgcaagattcgcaacctggtatacttagcctaggcgctaggtcctagtgcagcgggactttttttctaaagtcgttgagaggaggagtcgtcagaccagatagctttgatgtcctgatcggaaggatcgttggcccccctgcaggcagctgttaattaactgcgcgctcgctcgctcactgaggccgcccgggcaaagcccgggcgtcgggcgacctttggtcgcccggcctcagtgagcgagcgagcgcgcagagagggagtggccaactccatcactaggggttccttgtagttaatgattaacccgccatgctacttatctacggcgcgccacgcgttctaggagttaatttttaaaaagcagtcaaaagtccaagtgcccttgcgagcatttactctctctgtttgctctggttaataatctcaggagcacaaacattccttactagttctaggagttaatttttaaaaagcagtcaaaagtccaagtgcccttgcgagcatttactctctctgtttgctctggttaataatctcaggagcacaaacattccttactagttctagagcggccgccagtgtgctggaattcggcttttttagggctggaagctacctttgacatcatttcctctgcgaatgcatgtataatttctacagaacctattagaaaggatcacccagcctctgcttttgtacaactttcccttaaaaaactgccaatcccactgctgtttggcccaatagtgagaactttttcctgctgcctcttggtgcttttgcctatggcccctattctgcctgctgaagacactcttgccagcatggacttaaacccctccagctctgacaatcctctttctcttttgttttacatgaagggtctggcagccaaagcaatcactcaaagttcaaaccttatcattttttgctttgttcctcttggccttggttttgtacatcagctttgaaaataccatcccagggttaatgctggggttaatttataactgagagtgctctagttctgcaatacaggacatgctataaaaatggaaagatgttgctttctgagagatcaggtggattcttgggcatttgcttaagcttggtaccgccaccatgggagtgagacatcctccttgttctcatagactgctggctgtgtgtgctctggtgtctctggctacagctcagcagggagcttctagacctggacctagagatgctcaggctcatcctggaagacctagagctgtgcctacacagtgtgatgtgcctcctaattctagatttgattgtgctcctgataaggctataacacaggagcagtgtgaggctagaggatgttgttatattcctgctaagcagggactgcagggagctcagatgggacagccttggtgtttttttcctccttcttatccttcttataagctggagaatctgtcttcttctgagatgggatatacagctacactgacaagaacaacacctacattttttcctaaggatattctgacactgagactggatgtgatgatggagacagagaatagactgcattttacaattaaggatcctgctaatagaagatatgaggtgcctctagagacacctagagtgcattctagagctccttctcctctgtattctgtggagttttctgaggagccttttggagtgattgtgcatagacagctggatggaagagtgctgctgaatacaacagtggctcctctgttttttgctgatcagtttctgcagctgtctacatctctgccttctcagtatattacaggactggctgagcatctgtctcctctgatgctgtctacatcttggacaagaattacactgtggaatagagatctggctcctacacctggagctaatctgtatggatctcatcctttttatctggctctggaggatggaggatctgctcatggagtgtttctgctgaattctaatgctatggatgtagtgctgcagccttctcctgctctgtcttggagatctacaggaggaattctggatgtgtatatttttctaggacctgagcctaagtctgtggtgcagcagtatctggatgtagtgggatatccttttatgcctccttattggggactgggatttcatctgtgtagatggggatattcttctacagctattacaagacaggtggttgagaatatgacaagagctcattttcctctggatgtgcagtggaatgatctagattatatggattctagaagagattttacatttaataaggatggatttagagattttcctgctatggtgcaggagctgcatcagggaggaagaagatatatgatgattgtggatcctgctatttcttcttctggacctgctggatcttatagaccttatgatgagggactgagaagaggagtgtttattacaaatgagacaggacagcctctgattggaaaggtgtggcctggatctacagcttttcctgattttacaaatcctacagctctggcttggtgggaggatatggtggctgagtttcatgatcaggtgccttttgatggaatgtggattgatatgaatgagccttctaattttataagaggatctgaggatggatgtcctaataatgagctagagaatcctccttatgtgcctggagtagtgggaggaacactgcaggctgctacaatttgtgcttcttctcatcagtttctgtctacacattataatctgcataatctgtatggactgacagaggctattgcttctcatagagctctggtgaaggctagaggaacaagaccttttgtgatttctagatctacatttgctggacatggaagatatgctggacattggacaggagatgtatggtcttcttgggagcagctagcttcttctgtgcctgagattctgcagtttaatctgctaggagtgcctctggtgggagctgatgtgtgtggatttctgggaaatacatctgaggagctgtgtgtgagatggacacagctgggagctttttatccttttatgagaaatcataattctctgctgtctctgcctcaggagccttattctttttctgagcctgctcagcaggctatgagaaaggctctgacactgagatatgctctgctgcctcatctgtatacactgtttcatcaggctcatgtggctggagagacagtagctagacctctgtttctggagtttcctaaggattcttctacatggacagttgatcatcagctgctgtggggagaggctctgctgattacacctgtgctgcaggctggaaaggctgaggtgacaggatattttcctctgggaacatggtatgatctgcagacagtgcctatagaggctctgggatctctgcctcctcctcctgctgctcctagagagcctgctattcattctgagggacagtgggtgacactgcctgctcctctggatacaattaatgtgcatctgagagctggatatattattcctctgcagggacctggactgacaacaacagagtctagacagcagcctatggctctggctgtggctctgacaaagggaggagaggctagaggagagctgttttgggatgatggagagtctctggaggtgctggagagaggagcttatacacaggtgatttttctggctagaaataatacaattgtgaatgagctggtgagagtgacatctgagggagctggactgcagctgcagaaggtgacagtgctgggagtggctacagctcctcagcaggtgctgtctaatggagtgcctgtgtctaattttacatattctcctgatacaaaggtgctggatatttgtgtgtctctgctgatgggagagcagtttctggtgtcttggtgttaatgatttaaatctcgagccgggcggagtgtgttagtctctccagagggaggctggttccccagggaagcagagcctgtgtgcgggcagcagctgtgtgcgggcctgggggttgttaagtgcaattatttttaataaaaggggcatttggaaaaaaaaaaaaaaggtagcagtcgacagatgaattctgcagatctgtggcttctagctgcccgggtggcatccctgtgacccctccccagtgcctctcctggccctggaagttgccactccagtgcccaccagccttgtcctaataaaattaagttgcatcattttgtctgactaggtgtccttctataatattatggggtggaggggggtggtatggagcaaggggcaagttgggaagacaacctgtagggcctgcggggtctattgggaaccaagctggagtgcagtggcacaatcttggctcactgcaatctccgcctcctgggttcaagcgattctcctgcctcagcctcccgagttgttgggattccaggcatgcatgaccaggctcagctaatttttgtttttttggtagagacggggtttcaccatattggccaggctggtctccaactcctaatctcaggtgatctacccaccttggcctcccaaattgctgggattacaggcgtgaaccactgctcccttccctgtccttctgattttaaaaaaaagagaaatgttctggcacctgcacttgcactggggacagcctattttgctagtttgttttgtttcgttttgttttgatggagagcgtatgttgtttaaacgcggccgcgtagataagtagcatggcgggttaatcattaactacaaggaacccctagtgatggagttggccactccctctctgcgcgctcgctcgctcactgaggccgggcgaccaaaggtcgcccgacgcccgggctttgcccgggcggcctcagtgagcgagcgagcgcgcagttaattaaggcgccctaggccgacccttagactctgtactcagttctataaacgagccattggatacgagatccgtagattgataagggacacggaatatccccggacgcaatagacaccggtggacagcttggtatcctgagcacagtcgcgcgtccgaatctagctctactttagaggccccggattctgatggtcgtagaccgcagaaccgattggggggatgagatctactagttatcagcacacaattgcccattatacgcgcgtataatggactattgtgtgctgatatagggataacagggtaattctagagctagcatatggatccatcgatttgatgcggtattttctccttacgcatctgtgcggtatttcacaccgcatacgtcaaagcaaccatagtacgcgccctgtagcggcgcattaagcgcggcgggtgtggtggttacgcgcagcgtgaccgctacacttgccagcgccctagcgcccgctcctttcgctttcttcccttcctttctcgccacgttcgccggctttccccgtcaagctctaaatcgggggctccctttagggttccgatttagtgctttacggcacctcgaccccaaaaaacttgatttgggtgatggttcacgtagtgggccatcgccctgatagacggtttttcgccctttgacgttggagtccacgttctttaatagtggactcttgttccaaactggaacaacactcaactctatctcgggctattcttttgatttataagggattttgccgatttcggtctattggttaaaaaatgagctgatttaacaaaaatttaacgcgaattttaacaaaatattaacgtttacaattttatggtgcactctcagtacaatctgctctgatgccgcatagttaagccagccccgacacccgccaacacccgctgacgcgccctgacgggcttgtctgctcccggcatccgcttacagacaagctgtgaccgtctccgggagctgcatgtgtcagaggttttcaccgtcatcaccgaaacgcgcgagacgaaagggcctcgtgatacgcctatttttataggttaatgtcatgataataatggtttcttagacgtcaggtggcacttttcggggaaatgtgcgcggaacccctatttgtttatttttctaaatacattcaaatatgtatccgctcatgagacaataaccctgataaatgcttcaataatattgaaaaaggaagagtatgagccatattcaacgggaaacgtcgaggccgcgattaaattccaacatggatgctgatttatatgggtataaatgggctcgcgataatgtcgggcaatcaggtgcgacaatctatcgcttgtatgggaagcccgatgcgccagagttgtttctgaaacatggcaaaggtagcgttgccaatgatgttacagatgagatggtcagactaaactggctgacggaatttatgcctcttccgaccatcaagcattttatccgtactcctgatgatgcatggttactcaccactgcgatccccggaaaaacagcattccaggtattagaagaatatcctgattcaggtgaaaatattgttgatgcgctggcagtgttcctgcgccggttgcattcgattcctgtttgtaattgtccttttaacagcgatcgcgtatttcgtctcgctcaggcgcaatcacgaatgaataacggtttggttgatgcgagtgattttgatgacgagcgtaatggctggcctgttgaacaagtctggaaagaaatgcataaacttttgccattctcaccggattcagtcgtcactcatggtgatttctcacttgataaccttatttttgacgaggggaaattaataggttgtattgatgttggacgagtcggaatcgcagaccgataccaggatcttgccatcctatggaactgcctcggtgagttttctccttcattacagaaacggctttttcaaaaatatggtattgataatcctgatatgaataaattgcagtttcatttgatgctcgatgagtttttctaagcgtataatggtctagagctagcatatggatccatcgattccattatacgcctgtcagaccaagtttactcatatatactttagattgatttaaaacttcatttttaatttaaaaggatctaggtgaagatcctttttgataatctcatgaccaaaatcccttaacgtgagttttcgttccactgagcgtcagaccccgtagaaaagatcaaaggatcttcttgagatcctttttttctgcgcgtaatctgctgcttgcaaacaaaaaaaccaccgctaccagcggtggtttgtttgccggatcaagagctaccaactctttttccgaaggtaactggcttcagcagagcgcagataccaaatactgttcttctagtgtagccgtagttaggccaccacttcaagaactctgtagcaccgcctacatacctcgctctgctaatcctgttaccagtggctgctgccagtggcgataagtcgtgtcttaccgggttggactcaagacgatagttaccggataaggcgcagcggtcgggctgaacggggggttcgtgcacacagcccagcttggagcgaacgacctacaccgaactgagatacctacagcgtgagctatgagaaagcgccacgcttcccgaagggagaaaggcggacaggtatccggtaagcggcagggtcggaacaggagagcgcacgagggagcttccagggggaaacgcctggtatctttatagtcctgtcgggtttcgccacctctgacttgagcgtcgatttttgtgatgctcgtcaggggggcggagcctatggaaaaacgccagcaacgcggcctttttacggttcctggccttttgctggccttttgctcacatgt

SEQ ID NO: 502 - DNA, 9780 bp, synthetic construct
  source 1..9780: mol_type = other DNA
ctgcgcgctcgctcgctcactgaggccgcccgggcaaagcccgggcgtcgggcgacctttggtcgcccggcctcagtgagcgagcgagcgcgcagagagggagtggccaactccatcactaggggttcctggaggggtggagtcgtgacgtgaattacgtcatagggttagggaggtcggccgctctaggagttaatttttaaaaagcagtcaaaagtccaagtgcccttgcgagcatttactctctctgtttgctctggttaataatctcaggagcacaaacattccttactagttctaggagttaatttttaaaaagcagtcaaaagtccaagtgcccttgcgagcatttactctctctgtttgctctggttaataatctcaggagcacaaacattccttactagttctagagcggccgccagtgtgctggaattcggcttttttagggctggaagctacctttgacatcatttcctctgcgaatgcatgtataatttctacagaacctattagaaaggatcacccagcctctgcttttgtacaactttcccttaaaaaactgccaatcccactgctgtttggcccaatagtgagaactttttcctgctgcctcttggtgcttttgcctatggcccctattctgcctgctgaagacactcttgccagcatggacttaaacccctccagctctgacaatcctctttctcttttgttttacatgaagggtctggcagccaaagcaatcactcaaagttcaaaccttatcattttttgctttgttcctcttggccttggttttgtacatcagctttgaaaataccatcccagggttaatgctggggttaatttataactgagagtgctctagttctgcaatacaggacatgctataaaaatggaaagatgttgctttctgagagatcagcttacatgtggtaccgagctcggatccactagtaacggccgccagtgtgctggaattcggctttccaggccatctccaaccatgggagtgaggcacccgccctgctcccaccggctcctggccgtctgcgccctcgtgtccttggcaaccgctgcactcctggggcagcagggagccagcagaccagggccccgggatgcccaggcacaccccggccgtcccagagcagtgcccacacagtgcgacgtcccccccaacagccgcttcgattgcgcccctgacaaggccatcacccaggaacagtgcgaggcccgcggctgctgctacatccctgcaaagcaggggctgcagggagcccagatggggcagccctggtgcttcttcccacccagctaccccagctacaagctggagaacctgagctcctctgaaatgggctacacggccaccctgacccgtaccacccccaccttcttccccaaggacatcctgaccctgcggctggacgtgatgatggagactgagaaccgcctccacttcacgatcaaagatccagctaacaggcgctacgaggtgcccttggagaccccgcgtgtccacagccgggcaccgtccccactctacagcgtggagttctccgaggagcccttcggggtgatcgtgcaccggcagctggacggccgcgtgctgctgaacacgacggtggcgcccctgttctttgcggaccagttccttcagctgtccacctcgctgccctcgcagtatatcacaggcctcgccgagcacctcagtcccctgatgctcagcaccagctggaccaggatcaccctgtggaaccgggaccttgcgcccacgcccggtgcgaacctctacgggtctcaccctttctacctggcgctggaggacggcgggtcggcacacggggtgttcctgctaaacagcaatgccatggatgtggtcctgcagccgagccctgcccttagctggaggtcgacaggtgggatcctggatgtctacatcttcctgggcccagagcccaagagcgtggtgcagcagtacctggacgttgtgggatacccgttcatgccgccatactggggcctgggcttccacctgtgccgctggggctactcctccaccgctatcacccgccaggtggtggagaacatgaccagggcccacttccccctggacgtccaatggaacgacctggactacatggactcccggagggacttcacgttcaacaaggatggcttccgggacttcccggccatggtgcaggagctgcaccagggcggccggcgctacatgatgatcgtggatcctgccatcagcagctcgggccctgccgggagctacaggccctacgacgagggtctgcggaggggggttttcatcaccaacgagaccggccagccgctgattgggaaggtatggcccgggtccactgccttccccgacttcaccaaccccacagccctggcctggtgggaggacatggtggctgagttccatgaccaggtgcccttcgacggcatgtggattgacatgaacgagccttccaacttcatcagaggctctgaggacggctgccccaacaatgagctggagaacccaccctacgtgcctggggtggttggggggaccctccaggcggccaccatctgtgcctccagccaccagtttctctccacacactacaacctgcacaacctctacggcctgaccgaagccatcgcctcccacagggcgctggtgaaggctcgggggacacgcccatttgtgatctcccgctcgacctttgctggccacggccgatacgccggccactggacgggggacgtgtggagctcctgggagcagctcgcctcctccgtgccagaaatcctgcagtttaacctgctgggggtgcctctggtcggggccgacgtctgcggcttcctgggcaacacctcagaggagctgtgtgtgcgctggacccagctgggggccttctaccccttcatgcggaaccacaacagcctgctcagtctgccccaggagccgtacagcttcagcgagccggcccagcaggccatgaggaaggccctcaccctgcgctacgcactcctcccccacctctacacactgttccaccaggcccacgtcgcgggggagaccgtggcccggcccctcttcctggagttccccaaggactctagcacctggactgtggaccaccagctcctgtggggggaggccctgctcatcaccccagtgctccaggccgggaaggccgaagtgactggctacttccccttgggcacatggtacgacctgcagacggtgccaatagaggcccttggcagcctcccacccccacctgcagctccccgtgagccagccatccacagcgaggggcagtgggtgacgctgccggcccccctggacaccatcaacgtccacctccgggctgggtacatcatccccctgcagggccctggcctcacaaccacagagtcccgccagcagcccatggccctggctgtggccctgaccaagggtggagaggcccgaggggagctgttctgggacgatggagagagcctggaagtgctggagcgaggggcctacacacaggtcatcttcctggccaggaataacacgatcgtgaatgagctggtacgtgtgaccagtgagggagctggcctgcagctgcagaaggtgactgtcctgggcgtggccacggcgccccagcaggtcctctccaacggtgtccctgtctccaacttcacctacagccccgacaccaaggtcctggacatctgtgtctcgctgttgatgggagagcagtttctcgtcagctggtgttagccgggcggagtgtgttagtctctccagagggaggctggttccccagggaagcagagcctgtgtgcgggcagcagctgtgtgcgggcctgggggttgttaagtgcaattatttttaataaaaggggcatttggaaaaaaaaaaaaaaggtagcagtcgacagatgaattctgcagatctgtggcttctagctgcccgggtggcatccctgtgacccctccccagtgcctctcctggccctggaagttgccactccagtgcccaccagccttgtcctaataaaattaagttgcatcattttgtctgactaggtgtccttctataatattatggggtggaggggggtggtatggagcaaggggcaagttgggaagacaacctgagttgttgggattccaggcatcgagtagataagtagcatggcgggttaatcattaactacaaggaacccctagtgatggagttggccactccctctctgcgcgctcgctcgctcactgaggccgggcgaccaaaggtcgcccgacgcccgggctttgcccgggcggcctcagtgagcgagcgagcgcgcagagagggacagatccgaagccgggcaaatcagcgcctggcagcagtggcgtctggcggaaaacctcagtgtgacgctccccgccgcgtcccacgcttgttcccggatctgaccaccagcgaaatccgatttttgcaccgagctgggtaataagcgttggcaatttaaccgccagtcaggctttctttcacagtgtggattggcgataaaaaacaactgctgacgccgctgcgcgatcagttcacccgttcaccgctggataacgacttggcgtaagtgaagcgacccgtaagaccctaacgcctgggtcgaacgctggaaggcggcgggccaaaccaggccgaagcagcgttgttgcagttcacggcagatacacttgctgttgcggtgctgattacgaccgctcactcgtggcagcaacaggggaaaaccttatttatcagccggaaaacctaccggattgttggtagtggtcaataggcgattaccgttgtgttgaagtggcgagcgatacaccgcttccggcgcggattggcctgaactgccaactggcgcaggtagcagagcgggtaaactggctcggattagggccgcaagaaaactatcccgaccgccttactgccgcctgttttgaccgctgggatctgccaagtcagacagtatagcccgtacgtcttcccgagcgaaaacggtctgcgctgcgggacgcgcgaattgaatttggcccacaccagtggcgcggcgacttccagttcaatatcagccgctacagtgaacagcaactgttggaaaccagccttcgccaactgctgcacgcggaagaaggcactggctgaatatcgacggtttccagttggggattggtggcgacgactcctggagcccgtcagtatcggcggacttccaactgagcgccggtcgctaccttaccagttggtctggtgtcaaaaagcgtccgcttgagtctagcgatcgcgcgcagatctgtcatgtgagcaaaaggccagcaaaaggccaggaaccgtaaaaaggccgcgttgctggcgtttttccataggctccgcccccctgacgagcatcacaaaaatcgacgctcaagtcagaggtggcgaaacccgacaggactataaagataccaggcgtttccccctggaagctccctcgtgcgctctcctgttccgaccctgccgcttaccggatacctgtccgcctttctcccttcgggaagcgtggcgctttctcatagctcacgctgtaggtatctcagttcggtgtaggtcgttcgctccaagctgggctgtgtgcacgaaccccccgttcagcccgaccgctgcgccttatccggtaactatcgtcttgagtccaacccggtaagacacgacttatcgccactggcagcagccactggtaacaggattagcagagcgaggtatgtaggcggtgctacagagttcttgaagtggtggcctaactacggctacactagaagaacagtatttggtatctgcgctctgctgaagccagttaccttcggaaaaagagttggtagctcttgatccggcaaacaaaccaccgctggtagcggtggtttttttgtttgcaagcagcagattacgcgcagaaaaaaaggatctcaagaagatcctttgatcttttctacggggtctgacgctcagtggaacgaaaactcacgttaagggattttggtcatgagattatcaaaaaggatcttcacctagatccttttcacgtagaaagccagtccgcagaaacggtgctgaccccggatgaatgtcagctactgggctatctggacaagggaaaacgcaagcgcaaagagaaagcaggtagcttgcagtgggcttacatggcgatagctagactgggcggttttatggacagcaagcgaaccggaattgccagctggggcgccctctggtaaggttgggaagccctgcaaagtaaactggatggctttcttgccgccaaggatctgatggcgcaggggatcaagatctgatcaagagacaggatgaggatcgtttcgcatgattgaacaagatggattgcacgcaggttctccggccgcttgggtggagaggctattcggctatgactgggcacaacagacaatcggctgctctgatgccgccgtgttccggctgtcagcgcaggggcgcccggttctttttgtcaagaccgacctgtccggtgccctgaatgaactgcaagacgaggcagcgcggctatcgtggctggccacgacgggcgttccttgcgcagctgtgctcgacgttgtcactgaagcgggaagggactggctgctattgggcgaagtgccggggcaggatctcctgtcatctcaccttgctcctgccgagaaagtatccatcatggctgatgcaatgcggcggctgcatacgcttgatccggctacctgcccattcgaccaccaagcgaaacatcgcatcgagcgagcacgtactcggatggaagccggtcttgtcgatcaggatgatctggacgaagagcatcaggggctcgcgccagccgaactgttcgccaggctcaaggcgagcatgcccgacggcgaggatctcgtcgtgacccatggcgatgcctgcttgccgaatatcatggtggaaaatggccgcttttctggattcatcgactgtggccggctgggtgtggcggaccgctatcaggacatagcgttggctacccgtgatattgctgaagagcttggcggcgaatgggctgaccgcttcctcgtgctttacggtatcgccgctcccgattcgcagcgcatcgccttctatcgccttcttgacgagttcttctgaatttaaagcccaatacgcaaaccgcctctccccgcgcgttggccgaagcggttcaatattttgttaaaattcgcgttaaatttttgttaaatcagctattttttaaccaataggccgaaatcggcaaaatcccttgtaaatcaaaagaatagaccgagatagggttgagtgttgttccagtttggaacaagagtccactattaaagaacgtggactccaacgtcaaagggcgaaaaaccgtctatcagggcgttggcccactacgtgaaccttcaccctaatcaagttttttggggtcgaggtgccgtaaagcactaaatcggaaccctaaagggagcccccgatttagagcttgacggggaaaccggcgaacgtggcgagaaaggaagggaagaaagcgaaaggagcgggcgctagggcgctggcaagtgtagcggtcacgctgcgcgtaaccaccacacccgccgcgctaagcgccgctacagggcgcgtcccttcgccttcaggctgcgtcgagtactgtactgtgagccagagttgcccggcgctctccggctgcggtagttcaggcagttcaatcaactgtttaccttgtggagcgactccagaggcacttcaccgcttgccagcggcttacgatccagcgccacgatccagtgcaggagatcgttatcgctatacggaacaggtattcgctggtcacttcgataaggtttgcccggataaacggaactggaaaaactgctgctggtgttttgcttccgtcagtgctggatcggcgtgcggtcggcaaagaccagaccgttctaacagaactggcgattgttcggcgtatcgccaaaatcaccgccgtaagccgaccacgggttgccgttttcagcaggatttaatcagcgactgatccacccagtcccagacgaagccgccctgtaaacggggatactgacgaaacgcctgccagtatttagcgaaaccgccaagactgttacccaagcgtgggcgtattcgcaaaggatcagcgggcgcgtctctccaggtagcgaaagccttttttgatcgacctttcggcacagccgggaagggctggtcttcaaccacgcgcgcgtacaacgggcaaataatatcggtggccgtggtgtcggctccgccgccttcaactgcaccgggcgggaaggatcgacagatttgatccagcgatacagcgcgtcgtgattagcgccgtggcctgattcaattccccagcgaccagtagatcacactcgggtgattacgattgcgctgcaccagtcgcgttacggttcgctcttcgccggtagccagcgcggatcacggtcagacgattcgttggcacgatccgtgggtttcaatactggcttcaaaccaccactaacaggccgtagcggtcgcacagcgtgtaccacagcggttggttcggataatcgaacagcgcacggcgttaaagttgttctgcttcaacagcaggatattctgcaccttcgtctgctcttcctaacctgaccaagcagaggatctgctcgtgacggttaatcctcgaatcagcaacggcttgccgttcagcagcagcagaccaagttcaatccgcacctcgcggaaaccgacaacgcaggcttctgcttcaatcagcgtgccgtcggcggtgtgcagttcaaccaccgcacgatagagattcgggatttcggcgctccacagtttcgggttttcgacgttcagacgtagtgtgacgcgatctgcaaaccaccacgctcaacgataatttcaccgccgaaaggcgcggtgccgctggcgacctgcgtttcaccctgccagaaagaaactgttacccgtaggtagtcacgcaactcgccgcacactgaacttcagcctccagtacagcgcggctgaaatcgtcttaaagcgagtggcaactggaaatcgctgatttgtgtagtcggtttagcagcaacgagacttcacggaaaatccgctaatccgccacagatcctgatcttccagataactgccgtcactccaacgcagcaccttcaccgcgaggcggttttctccggcgcgtaaaaatcgctcaggtcaaattcagacggcaaacgactgtcctggccgtaaccgacccagcgcccgttgcaccacagattgaaacgccgagtttacgcctcaaaaataattcgcgtctggccttcctgtagccagctttcacaactataatagtgagcgagtaacaacccgtcggattctccgtgggaacaaacggcggattgaccgtatagggataggttacgttggtgtagtagggcgctccgtaaccgtgctactgccagtttgaggggacgacgacagtatcggcctcaggaagatcgcactccagccagctttccggcaccgcttctggtactggaaaccaggcaaagcgcctatcgcctatcaggctgcacaactgttgggaagggcgatctgtgcgggcctcttcgctattacgccagcttgcgaaagggggtagtgctgcaaggcgattaagttgggtaacgccagggttttcccagtcacgacgtggatctgggccactccctct

SEQ ID NO: 503 - DNA, 9768 bp, synthetic construct; identical to SEQ ID NO: 466
  source 1..9768: mol_type = other DNA

SEQ ID NO: 504 - DNA, 9834 bp, synthetic construct; identical to SEQ ID NO: 463
  source 1..9834: mol_type = other DNA

SEQ ID NO: 505 - DNA, 9828 bp, synthetic construct
  source 1..9828: mol_type = other DNA
ctgcgcgctcgctcgctcactgaggccgcccgggcaaagcccgggcgtcgggcgacctttggtcgcccggcctcagtgagcgagcgagcgcgcagagagggagtggccaactccatcactaggggttcctggaggggtggagtcgtgacgtgaattacgtcatagggttagggaggtcggccgctctaggagttaatttttaaaaagcagtcaaaagtccaagtgcccttgcgagcatttactctctctgtttgctctggttaataatctcaggagcacaaacattccttactagttctaggagttaatttttaaaaagcagtcaaaagtccaagtgcccttgcgagcatttactctctctgtttgctctggttaataatctcaggagcacaaacattccttactagttctagagcggccgccagtgtgctggaattcggcttttttagggctggaagctacctttgacatcatttcctctgcgaatgcatgtataatttctacagaacctattagaaaggatcacccagcctctgcttttgtacaactttcccttaaaaaactgccaatcccactgctgtttggcccaatagtgagaactttttcctgctgcctcttggtgcttttgcctatggcccctattctgcctgctgaagacactcttgccagcatggacttaaacccctccagctctgacaatcctctttctcttttgttttacatgaagggtctggcagccaaagcaatcactcaaagttcaaaccttatcattttttgctttgttcctcttggccttggttttgtacatcagctttgaaaataccatcccagggttaatgctggggttaatttataactgagagtgctctagttctgcaatacaggacatgctataaaaatggaaagatgttgctttctgagagatcagcttacatgtggtaccgagctcggatccactagtaacggccgccagtgtgctggaattcggctttccaggccatctccaaccatgggagtgaggcacccgccctgctcccaccggctcctggccgtctgcgccctcgtgtccttggcaaccgctatggagtttgggctgagctgggtctttctggtggccctgctgaagggagtccagtgtgagcagcagggagccagcagaccagggccccgggatgcccaggcacaccccggccgtcccagagcagtgcccacacagtgcgacgtcccccccaacagccgcttcgattgcgcccctgacaaggccatcacccaggaacagtgcgaggcccgcggctgctgctacatccctgcaaagcaggggctgcagggagcccagatggggcagccctggtgcttcttcccacccagctaccccagctacaagctggagaacctgagctcctctgaaatgggctacacggccaccctgacccgtaccacccccaccttcttccccaaggacatcctgaccctgcggctggacgtgatgatggagactgagaaccgcctccacttcacgatcaaagatccagctaacaggcgctacgaggtgcccttggagaccccgcgtgtccacagccgggcaccgtccccactctacagcgtggagttctccgaggagcccttcggggtgatcgtgcaccggcagctggacggccgcgtgctgctgaacacgacggtggcgcccctgttctttgcggaccagttccttcagctgtccacctcgctgccctcgcagtatatcacaggcctcgccgagcacctcagtcccctgatgctcagcaccagctggaccaggatcaccctgtggaaccgggaccttgcgcccacgcccggtgcgaacctctacgggtctcaccctttctacctggcgctggaggacggcgggtcggcacacggggtgttcctgctaaacagcaatgccatggatgtggtcctgcagccgagccctgcccttagctggaggtcgacaggtgggatcctggatgtctacatcttcctgggcccagagcccaagagcgtggtgcagcagtacctggacgttgtgggatacccgttcatgccgccatactggggcctgggcttccacctgtgccgctggggctactcctccaccgctatcacccgccaggtggtggagaacatgaccagggcccacttccccctggacgtccaatggaacgacctggactacatggactcccggagggacttcacgttcaacaaggatggcttccgggacttcccggccatggtgcaggagctgcaccagggcggccggcgctacatgatgatcgtggatcctgccatcagcagctcgggccctgccgggagctacaggccctacgacgagggtctgcggaggggggttttcatcaccaacgagaccggccagccgctgattgggaaggtatggcccgggtccactgccttccccgacttcaccaaccccacagccctggcctggtgggaggacatggtggctgagttccatgaccaggtgcccttcgacggcatgtggattgacatgaacgagccttccaacttcatcagaggctctgaggacggctgccccaacaatgagctggagaacccaccctacgtgcctggggtggttggggggaccctccaggcggccaccatctgtgcctccagccaccagtttctctccacacactacaacctgcacaacctctacggcctgaccgaagccatcgcctcccacagggcgctggtgaaggctcgggggacacgcccatttgtgatctcccgctcgacctttgctggccacggccgatacgccggccactggacgggggacgtgtggagctcctgggagcagctcgcctcctccgtgccagaaatcctgcagtttaacctgctgggggtgcctctggtcggggccgacgtctgcggcttcctgggcaacacctcagaggagctgtgtgtgcgctggacccagctgggggccttctaccccttcatgcggaaccacaacagcctgctcagtctgccccaggagccgtacagcttcagcgagccggcccagcaggccatgaggaaggccctcaccctgcgctacgcactcctcccccacctctacacactgttccaccaggcccacgtcgcgggggagaccgtggcccggcccctcttcctggagttccccaaggactctagcacctggactgtggaccaccagctcctgtggggggaggccctgctcatcaccccagtgctccaggccgggaaggccgaagtgactggctacttccccttgggcacatggtacgacctgcagacggtgccaatagaggcccttggcagcctcccacccccacctgcagctccccgtgagccagccatccacagcgaggggcagtgggtgacgctgccggcccccctggacaccatcaacgtccacctccgggctgggtacatcatccccctgcagggccctggcctcacaaccacagagtcccgccagcagcccatggccctggctgtggccctgaccaagggtggagaggcccgaggggagctgttctgggacgatggagagagcctggaagtgctggagcgaggggcctacacacaggtcatcttcctggccaggaataacacgatcgtgaatgagctggtacgtgtgaccagtgagggagctggcctgcagctgcagaaggtgactgtcctgggcgtggccacggcgccccagcaggtcctctccaacggtgtccctgtctccaacttcacctacagccccgacaccaaggtcctggacatctgtgtctcgctgttgatgggagagcagtttctcgtcagctggtgttagccgggcggagtgtgttagtctctccagagggaggctggttccccagggaagcagagcctgtgtgcgggcagcagctgtgtgcgggcctgggggttgttaagtgcaattatttttaataaaaggggcatttggaaaaaaaaaaaaaaggtagcagtcgacagatgaattctgcagatctgtggcttctagctgcccgggtggcatccctgtgacccctccccagtgcctctcctggccctggaagttgccactccagtgcccaccagccttgtcctaataaaattaagttgcatcattttgtctgactaggtgtccttctataatattatggggtggaggggggtggtatggagcaaggggcaagttgggaagacaacctgagttgttgggattccaggcatcgagtagataagtagcatggcgggttaatcattaactacaaggaacccctagtgatggagttggccactccctctctgcgcgctcgctcgctcactgaggccgggcgaccaaaggtcgcccgacgcccgggctttgcccgggcggcctcagtgagcgagcgagcgcgcagagagggacagatccgaagccgggcaaatcagcgcctggcagcagtggcgtctggcggaaaacctcagtgtgacgctccccgccgcgtcccacgcttgttcccggatctgaccaccagcgaaatccgatttttgcaccgagctgggtaataagcgttggcaatttaaccgccagtcaggctttctttcacagtgtggattggcgataaaaaacaactgctgacgccgctgcgcgatcagttcacccgttcaccgctggataacgacttggcgtaagtgaagcgacccgtaagaccctaacgcctgggtcgaacgctggaaggcggcgggccaaaccaggccgaagcagcgttgttgcagttcacggcagatacacttgctgttgcggtgctgattacgaccgctcactcgtggcagcaacaggggaaaaccttatttatcagccggaaaacctaccggattgttggtagtggtcaataggcgattaccgttgtgttgaagtggcgagcgatacaccgcttccggcgcggattggcctgaactgccaactggcgcaggtagcagagcgggtaaactggctcggattagggccgcaagaaaactatcccgaccgccttactgccgcctgttttgaccgctgggatctgccaagtcagacagtatagcccgtacgtcttcccgagcgaaaacggtctgcgctgcgggacgcgcgaattgaatttggcccacaccagtggcgcggcgacttccagttcaatatcagccgctacagtgaacagcaactgttggaaaccagccttcgccaactgctgcacgcggaagaaggcactggctgaatatcgacggtttccagttggggattggtggcgacgactcctggagcccgtcagtatcggcggacttccaactgagcgccggtcgctaccttaccagttggtctggtgtcaaaaagcgtccgcttgagtctagcgatcgcgcgcagatctgtcatgtgagcaaaaggccagcaaaaggccaggaaccgtaaaaaggccgcgttgctggcgtttttccataggctccgcccccctgacgagcatcacaaaaatcgacgctcaagtcagaggtggcgaaacccgacaggactataaagataccaggcgtttccccctggaagctccctcgtgcgctctcctgttccgaccctgccgcttaccggatacctgtccgcctttctcccttcgggaagcgtggcgctttctcatagctcacgctgtaggtatctcagttcggtgtaggtcgttcgctccaagctgggctgtgtgcacgaaccccccgttcagcccgaccgctgcgccttatccggtaactatcgtcttgagtccaacccggtaagacacgacttatcgccactggcagcagccactggtaacaggattagcagagcgaggtatgtaggcggtgctacagagttcttgaagtggtggcctaactacggctacactagaagaacagtatttggtatctgcgctctgctgaagccagttaccttcggaaaaagagttggtagctcttgatccggcaaacaaaccaccgctggtagcggtggtttttttgtttgcaagcagcagattacgcgcagaaaaaaaggatctcaagaagatcctttgatcttttctacggggtctgacgctcagtggaacgaaaactcacgttaagggattttggtcatgagattatcaaaaaggatcttcacctagatccttttcacgtagaaagccagtccgcagaaacggtgctgaccccggatgaatgtcagctactgggctatctggacaagggaaaacgcaagcgcaaagagaaagcaggtagcttgcagtgggcttacatggcgatagctagactgggcggttttatggacagcaagcgaaccggaattgccagctggggcgccctctggtaaggttgggaagccctgcaaagtaaactggatggctttcttgccgccaaggatctgatggcgcaggggatcaagatctgatcaagagacaggatgaggatcgtttcgcatgattgaacaagatggattgcacgcaggttctccggccgcttgggtggagaggctattcggctatgactgggcacaacagacaatcggctgctctgatgccgccgtgttccggctgtcagcgcaggggcgcccggttctttttgtcaagaccgacctgtccggtgccctgaatgaactgcaagacgaggcagcgcggctatcgtggctggccacgacgggcgttccttgcgcagctgtgctcgacgttgtcactgaagcgggaagggactggctgctattgggcgaagtgccggggcaggatctcctgtcatctcaccttgctcctgccgagaaagtatccatcatggctgatgcaatgcggcggctgcatacgcttgatccggctacctgcccattcgaccaccaagcgaaacatcgcatcgagcgagcacgtactcggatggaagccggtcttgtcgatcaggatgatctggacgaagagcatcaggggctcgcgccagccgaactgttcgccaggctcaaggcgagcatgcccgacggcgaggatctcgtcgtgacccatggcgatgcctgcttgccgaatatcatggtggaaaatggccgcttttctggattcatcgactgtggccggctgggtgtggcggaccgctatcaggacatagcgttggctacccgtgatattgctgaagagcttggcggcgaatgggctgaccgcttcctcgtgctttacggtatcgccgctcccgattcgcagcgcatcgccttctatcgccttcttgacgagttcttctgaatttaaagcccaatacgcaaaccgcctctccccgcgcgttggccgaagcggttcaatattttgttaaaattcgcgttaaatttttgttaaatcagctattttttaaccaataggccgaaatcggcaaaatcccttgtaaatcaaaagaatagaccgagatagggttgagtgttgttccagtttggaacaagagtccactattaaagaacgtggactccaacgtcaaagggcgaaaaaccgtctatcagggcgttggcccactacgtgaaccttcaccctaatcaagttttttggggtcgaggtgccgtaaagcactaaatcggaaccctaaagggagcccccgatttagagcttgacggggaaaccggcgaacgtggcgagaaaggaagggaagaaagcgaaaggagcgggcgctagggcgctggcaagtgtagcggtcacgctgcgcgtaaccaccacacccgccgcgctaagcgccgctacagggcgcgtcccttcgccttcaggctgcgtcgagtactgtactgtgagccagagttgcccggcgctctccggctgcggtagttcaggcagttcaatcaactgtttaccttgtggagcgactccagaggcacttcaccgcttgccagcggcttacgatccagcgccacgatccagtgcaggagatcgttatcgctatacggaacaggtattcgctggtcacttcgataaggtttgcccggataaacggaactggaaaaactgctgctggtgttttgcttccgtcagtgctggatcggcgtgcggtcggcaaagaccagaccgttctaacagaactggcgattgttcggcgtatcgccaaaatcaccgccgtaagccgaccacgggttgccgttttcagcaggatttaatcagcgactgatccacccagtcccagacgaagccgccctgtaaacggggatactgacgaaacgcctgccagtatttagcgaaaccgccaagactgttacccaagcgtgggcgtattcgcaaaggatcagcgggcgcgtctctccaggtagcgaaagccttttttgatcgacctttcggcacagccgggaagggctggtcttcaaccacgcgcgcgtacaacgggcaaataatatcggtggccgtggtgtcggctccgccgccttcaactgcaccgggcgggaaggatcgacagatttgatccagcgatacagcgcgtcgtgattagcgccgtggcctgattcaattccccagcgaccagtagatcacactcgggtgattacgattgcgctgcaccagtcgcgttacggttcgctcttcgccggtagccagcgcggatcacggtcagacgattcgttggcacgatccgtgggtttcaatactggcttcaaaccaccactaacaggccgtagcggtcgcacagcgtgtaccacagcggttggttcggataatcgaacagcgcacggcgttaaagttgttctgcttcaacagcaggatattctgcaccttcgtctgctcttcctaacctgaccaagcagaggatctgctcgtgacggttaatcctcgaatcagcaacggcttgccgttcagcagcagcagaccaagttcaatccgcacctcgcggaaaccgacaacgcaggcttctgcttcaatcagcgtgccgtcggcggtgtgcagttcaaccaccgcacgatagagattcgggatttcggcgctccacagtttcgggttttcgacgttcagacgtagtgtgacgcgatctgcaaaccaccacgctcaacgataatttcaccgccgaaaggcgcggtgccgctggcgacctgcgtttcaccctgccagaaagaaactgttacccgtaggtagtcacgcaactcgccgcacactgaacttcagcctccagtacagcgcggctgaaatcgtcttaaagcgagtggcaactggaaatcgctgatttgtgtagtcggtttagcagcaacgagacttcacggaaaatccgctaatccgccacagatcctgatcttccagataactgccgtcactccaacgcagcaccttcaccgcgaggcggttttctccggcgcgtaaaaatcgctcaggtcaaattcagacggcaaacgactgtcctggccgtaaccgacccagcgcccgttgcaccacagattgaaacgccgagtttacgcctcaaaaataattcgcgtctggccttcctgtagccagctttcacaactataatagtgagcgagtaacaacccgtcggattctccgtgggaacaaacggcggattgaccgtatagggataggttacgttggtgtagtagggcgctccgtaaccgtgctactgccagtttgaggggacgacgacagtatcggcctcaggaagatcgcactccagccagctttccggcaccgcttctggtactggaaaccaggcaaagcgcctatcgcctatcaggctgcacaactgttgggaagggcgatctgtgcgggcctcttcgctattacgccagcttgcgaaagggggtagtgctgcaaggcgattaagttgggtaacgccagggttttcccagtcacgacgtggatctgggccactccctct

SEQ ID NO: 506 - DNA, 9759 bp, synthetic construct
  source 1..9759: mol_type = other DNA
ctgcgcgctcgctcgctcactgaggccgcccgggcaaagcccgggcgtcgggcgacctttggtcgcccggcctcagtgagcgagcgagcgcgcagagagggagtggccaactccatcactaggggttcctggaggggtggagtcgtgacgtgaattacgtcatagggttagggaggtcggccgctctaggagttaatttttaaaaagcagtcaaaagtccaagtgcccttgcgagcatttactctctctgtttgctctggttaataatctcaggagcacaaacattccttactagttctaggagttaatttttaaaaagcagtcaaaagtccaagtgcccttgcgagcatttactctctctgtttgctctggttaataatctcaggagcacaaacattccttactagttctagagcggccgccagtgtgctggaattcggcttttttagggctggaagctacctttgacatcatttcctctgcgaatgcatgtataatttctacagaacctattagaaaggatcacccagcctctgcttttgtacaactttcccttaaaaaactgccaatcccactgctgtttggcccaatagtgagaactttttcctgctgcctcttggtgcttttgcctatggcccctattctgcctgctgaagacactcttgccagcatggacttaaacccctccagctctgacaatcctctttctcttttgttttacatgaagggtctggcagccaaagcaatcactcaaagttcaaaccttatcattttttgctttgttcctcttggccttggttttgtacatcagctttgaaaataccatcccagggttaatgctggggttaatttataactgagagtgctctagttctgcaatacaggacatgctataaaaatggaaagatgttgctttctgagagatcagcttacatgtggtaccgagctcggatccactagtaacggccgccagtgtgctggaattcggctttccaggccatctccaaccatggggtacagaatgcagctgctgtcctgcattgcactgtcactggcactggttaccaactcacagcagggagccagcagaccagggccccgggatgcccaggcacaccccggccgtcccagagcagtgcccacacagtgcgacgtcccccccaacagccgcttcgattgcgcccctgacaaggccatcacccaggaacagtgcgaggcccgcggctgctgctacatccctgcaaagcaggggctgcagggagcccagatggggcagccctggtgcttcttcccacccagctaccccagctacaagctggagaacctgagctcctctgaaatgggctacacggccaccctgacccgtaccacccccaccttcttccccaaggacatcctgaccctgcggctggacgtgatgatggagactgagaaccgcctccacttcacgatcaaagatccagctaacaggcgctacgaggtgcccttggagaccccgcgtgtccacagccgggcaccgtccccactctacagcgtggagttctccgaggagcccttcggggtgatcgtgcaccggcagctggacggccgcgtgctgctgaacacgacggtggcgcccctgttctttgcggaccagttccttcagctgtccacctcgctgccctcgcagtatatcacaggcctcgccgagcacctcagtcccctgatgctcagcaccagctggaccaggatcaccctgtggaaccgggaccttgcgcccacgcccggtgcgaacctctacgggtctcaccctttctacctggcgctggaggacggcgggtcggcacacggggtgttcctgctaaacagcaatgccatggatgtggtcctgcagccgagccctgcccttagctggaggtcgacaggtgggatcctggatgtctacatcttcctgggcccagagcccaagagcgtggtgcagcagtacctggacgttgtgggatacccgttcatgccgccatactggggcctgggcttccacctgtgccgctggggctactcctccaccgctatcacccgccaggtggtggagaacatgaccagggcccacttccccctggacgtccaatggaacgacctggactacatggactcccggagggacttcacgttcaacaaggatggcttccgggacttcccggccatggtgcaggagctgcaccagggcggccggcgctacatgatgatcgtggatcctgccatcagcagctcgggccctgccgggagctacaggccctacgacgagggtctgcggaggggggttttcatcaccaacgagaccggccagccgctgattgggaaggtatggcccgggtccactgccttccccgacttcaccaaccccacagccctggcctggtgggaggacatggtggctgagttccatgaccaggtgcccttcgacggcatgtggattgacatgaacgagccttccaacttcatcagaggctctgaggacggctgccccaacaatgagctggagaacccaccctacgtgcctggggtggttggggggaccctccaggcggccaccatctgtgcctccagccaccagtttctctccacacactacaacctgcacaacctctacggcctgaccgaagccatcgcctcccacagggcgctggtgaaggctcgggggacacgcccatttgtgatctcccgctcgacctttgctggccacggccgatacgccggccactggacgggggacgtgtggagctcctgggagcagctcgcctcctccgtgccagaaatcctgcagtttaacctgctgggggtgcctctggtcggggccgacgtctgcggcttcctgggcaacacctcagaggagctgtgtgtgcgctggacccagctgggggccttctaccccttcatgcggaaccacaacagcctgctcagtctgccccaggagccgtacagcttcagcgagccggcccagcaggccatgaggaaggccctcaccctgcgctacgcactcctcccccacctctacacactgttccaccaggcccacgtcgcgggggagaccgtggcccggcccctcttcctggagttccccaaggactctagcacctggactgtggaccaccagctcctgtggggggaggccctgctcatcaccccagtgctccaggccgggaaggccgaagtgactggctacttccccttgggcacatggtacgacctgcagacggtgccaatagaggcccttggcagcctcccacccccacctgcagctccccgtgagccagccatccacagcgaggggcagtgggtgacgctgccggcccccctggacaccatcaacgtccacctccgggctgggtacatcatccccctgcagggccctggcctcacaaccacagagtcccgccagcagcccatggccctggctgtggccctgaccaagggtggagaggcccgaggggagctgttctgggacgatggagagagcctggaagtgctggagcgaggggcctacacacaggtcatcttcctggccaggaataacacgatcgtgaatgagctggtacgtgtgaccagtgagggagctggcctgcagctgcagaaggtgactgtcctgggcgtggccacggcgccccagcaggtcctctccaacggtgtccctgtctccaacttcacctacagccccgacaccaaggtcctggacatctgtgtctcgctgttgatgggagagcagtttctcgtcagctggtgttagccgggcggagtgtgttagtctctccagagggaggctggttccccagggaagcagagcctgtgtgcgggcagcagctgtgtgcgggcctgggggttgttaagtgcaattatttttaataaaaggggcatttggaaaaaaaaaaaaaaggtagcagtcgacagatgaattctgcagatctgtggcttctagctgcccgggtggcatccctgtgacccctccccagtgcctctcctggccctggaagttgccactccagtgcccaccagccttgtcctaataaaattaagttgcatcattttgtctgactaggtgtccttctataatattatggggtggaggggggtggtatggagcaaggggcaagttgggaagacaacctgagttgttgggattccaggcatcgagtagataagtagcatggcgggttaatcattaactacaaggaacccctagtgatggagttggccactccctctctgcgcgctcgctcgctcactgaggccgggcgaccaaaggtcgcccgacgcccgggctttgcccgggcggcctcagtgagcgagcgagcgcgcagagagggacagatccgaagccgggcaaatcagcgcctggcagcagtggcgtctggcggaaaacctcagtgtgacgctccccgccgcgtcccacgcttgttcccggatctgaccaccagcgaaatccgatttttgcaccgagctgggtaataagcgttggcaatttaaccgccagtcaggctttctttcacagtgtggattggcgataaaaaacaactgctgacgccgctgcgcgatcagttcacccgttcaccgctggataacgacttggcgtaagtgaagcgacccgtaagaccctaacgcctgggtcgaacgctggaaggcggcgggccaaaccaggccgaagcagcgttgttgcagttcacggcagatacacttgctgttgcggtgctgattacgaccgctcactcgtggcagcaacaggggaaaaccttatttatcagccggaaaacctaccggattgttggtagtggtcaataggcgattaccgttgtgttgaagtggcgagcgatacaccgcttccggcgcggattggcctgaactgccaactggcgcaggtagcagagcgggtaaactggctcggattagggccgcaagaaaactatcccgaccgccttactgccgcctgttttgaccgctgggatctgccaagtcagacagtatagcccgtacgtcttcccgagcgaaaacggtctgcgctgcgggacgcgcgaattgaatttggcccacaccagtggcgcggcgacttccagttcaatatcagccgctacagtgaacagcaactgttggaaaccagccttcgccaactgctgcacgcggaagaaggcactggctgaatatcgacggtttccagttggggattggtggcgacgactcctggagcccgtcagtatcggcggacttccaactgagcgccggtcgctaccttaccagttggtctggtgtcaaaaagcgtccgcttgagtctagcgatcgcgcgcagatctgtcatgtgagcaaaaggccagcaaaaggccaggaaccgtaaaaaggccgcgttgctggcgtttttccataggctccgcccccctgacgagcatcacaaaaatcgacgctcaagtcagaggtggcgaaacccgacaggactataaagataccaggcgtttccccctggaagctccctcgtgcgctctcctgttccgaccctgccgcttaccggatacctgtccgcctttctcccttcgggaagcgtggcgctttctcatagctcacgctgtaggtatctcagttcggtgtaggtcgttcgctccaagctgggctgtgtgcacgaaccccccgttcagcccgaccgctgcgccttatccggtaactatcgtcttgagtccaacccggtaagacacgacttatcgccactggcagcagccactggtaacaggattagcagagcgaggtatgtaggcggtgctacagagttcttgaagtggtggcctaactacggctacactagaagaacagtatttggtatctgcgctctgctgaagccagttaccttcggaaaaagagttggtagctcttgatccggcaaacaaaccaccgctggtagcggtggtttttttgtttgcaagcagcagattacgcgcagaaaaaaaggatctcaagaagatcctttgatcttttctacggggtctgacgctcagtggaacgaaaactcacgttaagggattttggtcatgagattatcaaaaaggatcttcacctagatccttttcacgtagaaagccagtccgcagaaacggtgctgaccccggatgaatgtcagctactgggctatctggacaagggaaaacgcaagcgcaaagagaaagcaggtagcttgcagtgggcttacatggcgatagctagactgggcggttttatggacagcaagcgaaccggaattgccagctggggcgccctctggtaaggttgggaagccctgcaaagtaaactggatggctttcttgccgccaaggatctgatggcgcaggggatcaagatctgatcaagagacaggatgaggatcgtttcgcatgattgaacaagatggattgcacgcaggttctccggccgcttgggtggagaggctattcggctatgactgggcacaacagacaatcggctgctctgatgccgccgtgttccggctgtcagcgcaggggcgcccggttctttttgtcaagaccgacctgtccggtgccctgaatgaactgcaagacgaggcagcgcggctatcgtggctggccacgacgggcgttccttgcgcagctgtgctcgacgttgtcactgaagcgggaagggactggctgctattgggcgaagtgccggggcaggatctcctgtcatctcaccttgctcctgccgagaaagtatccatcatggctgatgcaatgcggcggctgcatacgcttgatccggctacctgcccattcgaccaccaagcgaaacatcgcatcgagcgagcacgtactcggatggaagccggtcttgtcgatcaggatgatctggacgaagagcatcaggggctcgcgccagccgaactgttcgccaggctcaaggcgagcatgcccgacggcgaggatctcgtcgtgacccatggcgatgcctgcttgccgaatatcatggtggaaaatggccgcttttctggattcatcgactgtggccggctgggtgtggcggaccgctatcaggacatagcgttggctacccgtgatattgctgaagagcttggcggcgaatgggctgaccgcttcctcgtgctttacggtatcgccgctcccgattcgcagcgcatcgccttctatcgccttcttgacgagttcttctgaatttaaagcccaatacgcaaaccgcctctccccgcgcgttggccgaagcggttcaatattttgttaaaattcgcgttaaatttttgttaaatcagctattttttaaccaataggccgaaatcggcaaaatcccttgtaaatcaaaagaatagaccgagatagggttgagtgttgttccagtttggaacaagagtccactattaaagaacgtggactccaacgtcaaagggcgaaaaaccgtctatcagggcgttggcccactacgtgaaccttcaccctaatcaagttttttggggtcgaggtgccgtaaagcactaaatcggaaccctaaagggagcccccgatttagagcttgacggggaaaccggcgaacgtggcgagaaaggaagggaagaaagcgaaaggagcgggcgctagggcgctggcaagtgtagcggtcacgctgcgcgtaaccaccacacccgccgcgctaagcgccgctacagggcgcgtcccttcgccttcaggctgcgtcgagtactgtactgtgagccagagttgcccggcgctctccggctgcggtagttcaggcagttcaatcaactgtttaccttgtggagcgactccagaggcacttcaccgcttgccagcggcttacgatccagcgccacgatccagtgcaggagatcgttatcgctatacggaacaggtattcgctggtcacttcgataaggtttgcccggataaacggaactggaaaaactgctgctggtgttttgcttccgtcagtgctggatcggcgtgcggtcggcaaagaccagaccgttctaacagaactggcgattgttcggcgtatcgccaaaatcaccgccgtaagccgaccacgggttgccgttttcagcaggatttaatcagcgactgatccacccagtcccagacgaagccgccctgtaaacggggatactgacgaaacgcctgccagtatttagcgaaaccgccaagactgttacccaagcgtgggcgtattcgcaaaggatcagcgggcgcgtctctccaggtagcgaaagccttttttgatcgacctttcggcacagccgggaagggctggtcttcaaccacgcgcgcgtacaacgggcaaataatatcggtggccgtggtgtcggctccgccgccttcaactgcaccgggcgggaaggatcgacagatttgatccagcgatacagcgcgtcgtgattagcgccgtggcctgattcaattccccagcgaccagtagatcacactcgggtgattacgattgcgctgcaccagtcgcgttacggttcgctcttcgccggtagccagcgcggatcacggtcagacgattcgttggcacgatccgtgggtttcaatactggcttcaaaccaccactaacaggccgtagcggtcgcacagcgtgtaccacagcggttggttcggataatcgaacagcgcacggcgttaaagttgttctgcttcaacagcaggatattctgcaccttcgtctgctcttcctaacctgaccaagcagaggatctgctcgtgacggttaatcctcgaatcagcaacggcttgccgttcagcagcagcagaccaagttcaatccgcacctcgcggaaaccgacaacgcaggcttctgcttcaatcagcgtgccgtcggcggtgtgcagttcaaccaccgcacgatagagattcgggatttcggcgctccacagtttcgggttttcgacgttcagacgtagtgtgacgcgatctgcaaaccaccacgctcaacgataatttcaccgccgaaaggcgcggtgccgctggcgacctgcgtttcaccctgccagaaagaaactgttacccgtaggtagtcacgcaactcgccgcacactgaacttcagcctccagtacagcgcggctgaaatcgtcttaaagcgagtggcaactggaaatcgctgatttgtgtagtcggtttagcagcaacgagacttcacggaaaatccgctaatccgccacagatcctgatcttccagataactgccgtcactccaacgcagcaccttcaccgcgaggcggttttctccggcgcgtaaaaatcgctcaggtcaaattcagacggcaaacgactgtcctggccgtaaccgacccagcgcccgttgcaccacagattgaaacgccgagtttacgcctcaaaaataattcgcgtctggccttcctgtagccagctttcacaactataatagtgagcgagtaacaacccgtcggattctccgtgggaacaaacggcggattgaccgtatagggataggttacgttggtgtagtagggcgctccgtaaccgtgctactgccagtttgaggggacgacgacagtatcggcctcaggaagatcgcactccagccagctttccggcaccgcttctggtactggaaaccaggcaaagcgcctatcgcctatcaggctgcacaactgttgggaagggcgatctgtgcgggcctcttcgctattacgccagcttgcgaaagggggtagtgctgcaaggcgattaagttgggtaacgccagggttttcccagtcacgacgtggatctgggccactccctct

SEQ ID NO: 507 - DNA, 9828 bp, synthetic construct
  source 1..9828: mol_type = other DNA
ctgcgcgctcgctcgctcactgaggccgcccgggcaaagcccgggcgtcgggcgacctttggtcgcccggcctcagtgagcgagcgagcgcgcagagagggagtggccaactccatcactaggggttcctggaggggtggagtcgtgacgtgaattacgtcatagggttagggaggtcggccgctctaggagttaatttttaaaaagcagtcaaaagtccaagtgcccttgcgagcatttactctctctgtttgctctggttaataatctcaggagcacaaacattccttactagttctaggagttaatttttaaaaagcagtcaaaagtccaagtgcccttgcgagcatttactctctctgtttgctctggttaataatctcaggagcacaaacattccttactagttctagagcggccgccagtgtgctggaattcggcttttttagggctggaagctacctttgacatcatttcctctgcgaatgcatgtataatttctacagaacctattagaaaggatcacccagcctctgcttttgtacaactttcccttaaaaaactgccaatcccactgctgtttggcccaatagtgagaactttttcctgctgcctcttggtgcttttgcctatggcccctattctgcctgctgaagacactcttgccagcatggacttaaacccctccagctctgacaatcctctttctcttttgttttacatgaagggtctggcagccaaagcaatcactcaaagttcaaaccttatcattttttgctttgttcctcttggccttggttttgtacatcagctttgaaaataccatcccagggttaatgctggggttaatttataactgagagtgctctagttctgcaatacaggacatgctataaaaatggaaagatgttgctttctgagagatcagcttacatgtggtaccgagctcggatccactagtaacggccgccagtgtgctggaattcggctttccaggccatctttttttatgggagtgaggcacccgccctgctcccaccggctcctggccgtctgcgccctcgtgtccttggcaaccgccatggagtttgggctgagctgggtctttctggtggccctgctgaagggagtccagtgtgagcagcagggagccagcagaccagggccccgggatgcccaggcacaccccggccgtcccagagcagtgcccacacagtgcgacgtcccccccaacagccgcttcgattgcgcccctgacaaggccatcacccaggaacagtgcgaggcccgcggctgctgctacatccctgcaaagcaggggctgcagggagcccagatggggcagccctggtgcttcttcccacccagctaccccagctacaagctggagaacctgagctcctctgaaatgggctacacggccaccctgacccgtaccacccccaccttcttccccaaggacatcctgaccctgcggctggacgtgatgatggagactgagaaccgcctccacttcacgatcaaagatccagctaacaggcgctacgaggtgcccttggagaccccgcgtgtccacagccgggcaccgtccccactctacagcgtggagttctccgaggagcccttcggggtgatcgtgcaccggcagctggacggccgcgtgctgctgaacacgacggtggcgcccctgttctttgcggaccagttccttcagctgtccacctcgctgccctcgcagtatatcacaggcctcgccgagcacctcagtcccctgatgctcagcaccagctggaccaggatcaccctgtggaaccgggaccttgcgcccacgcccggtgcgaacctctacgggtctcaccctttctacctggcgctggaggacggcgggtcggcacacggggtgttcctgctaaacagcaatgccatggatgtggtcctgcagccgagccctgcccttagctggaggtcgacaggtgggatcctggatgtctacatcttcctgggcccagagcccaagagcgtggtgcagcagtacctggacgttgtgggatacccgttcatgccgccatactggggcctgggcttccacctgtgccgctggggctactcctccaccgctatcacccgccaggtggtggagaacatgaccagggcccacttccccctggacgtccaatggaacgacctggactacatggactcccggagggacttcacgttcaacaaggatggcttccgggacttcccggccatggtgcaggagctgcaccagggcggccggcgctacatgatgatcgtggatcctgccatcagcagctcgggccctgccgggagctacaggccctacgacgagggtctgcggaggggggttttcatcaccaacgagaccggccagccgctgattgggaaggtatggcccgggtccactgccttccccgacttcaccaaccccacagccctggcctggtgggaggacatggtggctgagttccatgaccaggtgcccttcgacggcatgtggattgacatgaacgagccttccaacttcatcagaggctctgaggacggctgccccaacaatgagctggagaacccaccctacgtgcctggggtggttggggggaccctccaggcggccaccatctgtgcctccagccaccagtttctctccacacactacaacctgcacaacctctacggcctgaccgaagccatcgcctcccacagggcgctggtgaaggctcgggggacacgcccatttgtgatctcccgctcgacctttgctggccacggccgatacgccggccactggacgggggacgtgtggagctcctgggagcagctcgcctcctccgtgccagaaatcctgcagtttaacctgctgggggtgcctctggtcggggccgacgtctgcggcttcctgggcaacacctcagaggagctgtgtgtgcgctggacccagctgggggccttctaccccttcatgcggaaccacaacagcctgctcagtctgccccaggagccgtacagcttcagcgagccggcccagcaggccatgaggaaggccctcaccctgcgctacgcactcctcccccacctctacacactgttccaccaggcccacgtcgcgggggagaccgtggcccggcccctcttcctggagttccccaaggactctagcacctggactgtggaccaccagctcctgtggggggaggccctgctcatcaccccagtgctccaggccgggaaggccgaagtgactggctacttccccttgggcacatggtacgacctgcagacggtgccaatagaggcccttggcagcctcccacccccacctgcagctccccgtgagccagccatccacagcgaggggcagtgggtgacgctgccggcccccctggacaccatcaacgtccacctccgggctgggtacatcatccccctgcagggccctggcctcacaaccacagagtcccgccagcagcccatggccctggctgtggccctgaccaagggtggagaggcccgaggggagctgttctgggacgatggagagagcctggaagtgctggagcgaggggcctacacacaggtcatcttcctggccaggaataacacgatcgtgaatgagctggtacgtgtgaccagtgagggagctggcctgcagctgcagaaggtgactgtcctgggcgtggccacggcgccccagcaggtcctctccaacggtgtccctgtctccaacttcacctacagccccgacaccaaggtcctggacatctgtgtctcgctgttgatgggagagcagtttctcgtcagctggtgttagccgggcggagtgtgttagtctctccagagggaggctggttccccagggaagcagagcctgtgtgcgggcagcagctgtgtgcgggcctgggggttgttaagtgcaattatttttaataaaaggggcatttggaaaaaaaaaaaaaaggtagcagtcgacagatgaattctgcagatctgtggcttctagctgcccgggtggcatccctgtgacccctccccagtgcctctcctggccctggaagttgccactccagtgcccaccagccttgtcctaataaaattaagttgcatcattttgtctgactaggtgtccttctataatattatggggtggaggggggtggtatggagcaaggggcaagttgggaagacaacctgagttgttgggattccaggcatcgagtagataagtagcatggcgggttaatcattaactacaaggaacccctagtgatggagttggccactccctctctgcgcgctcgctcgctcactgaggccgggcgaccaaaggtcgcccgacgcccgggctttgcccgggcggcctcagtgagcgagcgagcgcgcagagagggacagatccgaagccgggcaaatcagcgcctggcagcagtggcgtctggcggaaaacctcagtgtgacgctccccgccgcgtcccacgcttgttcccggatctgaccaccagcgaaatccgatttttgcaccgagctgggtaataagcgttggcaatttaaccgccagtcaggctttctttcacagtgtggattggcgataaaaaacaactgctgacgccgctgcgcgatcagttcacccgttcaccgctggataacgacttggcgtaagtgaagcgacccgtaagaccctaacgcctgggtcgaacgctggaaggcggcgggccaaaccaggccgaagcagcgttgttgcagttcacggcagatacacttgctgttgcggtgctgattacgaccgctcactcgtggcagcaacaggggaaaaccttatttatcagccggaaaacctaccggattgttggtagtggtcaataggcgattaccgttgtgttgaagtggcgagcgatacaccgcttccggcgcggattggcctgaactgccaactggcgcaggtagcagagcgggtaaactggctcggattagggccgcaagaaaactatcccgaccgccttactgccgcctgttttgaccgctgggatctgccaagtcagacagtatagcccgtacgtcttcccgagcgaaaacggtctgcgctgcgggacgcgcgaattgaatttggcccacaccagtggcgcggcgacttccagttcaatatcagccgctacagtgaacagcaactgttggaaaccagccttcgccaactgctgcacgcggaagaaggcactggctgaatatcgacggtttccagttggggattggtggcgacgactcctggagcccgtcagtatcggcggacttccaactgagcgccggtcgctaccttaccagttggtctggtgtcaaaaagcgtccgcttgagtctagcgatcgcgcgcagatctgtcatgtgagcaaaaggccagcaaaaggccaggaaccgtaaaaaggccgcgttgctggcgtttttccataggctccgcccccctgacgagcatcacaaaaatcgacgctcaagtcagaggtggcgaaacccgacaggactataaagataccaggcgtttccccctggaagctccctcgtgcgctctcctgttccgaccctgccgcttaccggatacctgtccgcctttctcccttcgggaagcgtggcgctttctcatagctcacgctgtaggtatctcagttcggtgtaggtcgttcgctccaagctgggctgtgtgcacgaaccccccgttcagcccgaccgctgcgccttatccggtaactatcgtcttgagtccaacccggtaagacacgacttatcgccactggcagcagccactggtaacaggattagcagagcgaggtatgtaggcggtgctacagagttcttgaagtggtggcctaactacggctacactagaagaacagtatttggtatctgcgctctgctgaagccagttaccttcggaaaaagagttggtagctcttgatccggcaaacaaaccaccgctggtagcggtggtttttttgtttgcaagcagcagattacgcgcagaaaaaaaggatctcaagaagatcctttgatcttttctacggggtctgacgctcagtggaacgaaaactcacgttaagggattttggtcatgagattatcaaaaaggatcttcacctagatccttttcacgtagaaagccagtccgcagaaacggtgctgaccccggatgaatgtcagctactgggctatctggacaagggaaaacgcaagcgcaaagagaaagcaggtagcttgcagtgggcttacatggcgatagctagactgggcggttttatggacagcaagcgaaccggaattgccagctggggcgccctctggtaaggttgggaagccctgcaaagtaaactggatggctttcttgccgccaaggatctgatggcgcaggggatcaagatctgatcaagagacaggatgaggatcgtttcgcatgattgaacaagatggattgcacgcaggttctccggccgcttgggtggagaggctattcggctatgactgggcacaacagacaatcggctgctctgatgccgccgtgttccggctgtcagcgcaggggcgcccggttctttttgtcaagaccgacctgtccggtgccctgaatgaactgcaagacgaggcagcgcggctatcgtggctggccacgacgggcgttccttgcgcagctgtgctcgacgttgtcactgaagcgggaagggactggctgctattgggcgaagtgccggggcaggatctcctgtcatctcaccttgctcctgccgagaaagtatccatcatggctgatgcaatgcggcggctgcatacgcttgatccggctacctgcccattcgaccaccaagcgaaacatcgcatcgagcgagcacgtactcggatggaagccggtcttgtcgatcaggatgatctggacgaagagcatcaggggctcgcgccagccgaactgttcgccaggctcaaggcgagcatgcccgacggcgaggatctcgtcgtgacccatggcgatgcctgcttgccgaatatcatggtggaaaatggccgcttttctggattcatcgactgtggccggctgggtgtggcggaccgctatcaggacatagcgttggctacccgtgatattgctgaagagcttggcggcgaatgggctgaccgcttcctcgtgctttacggtatcgccgctcccgattcgcagcgcatcgccttctatcgccttcttgacgagttcttctgaatttaaagcccaatacgcaaaccgcctctccccgcgcgttggccgaagcggttcaatattttgttaaaattcgcgttaaatttttgttaaatcagctattttttaaccaataggccgaaatcggcaaaatcccttgtaaatcaaaagaatagaccgagatagggttgagtgttgttccagtttggaacaagagtccactattaaagaacgtggactccaacgtcaaagggcgaaaaaccgtctatcagggcgttggcccactacgtgaaccttcaccctaatcaagttttttggggtcgaggtgccgtaaagcactaaatcggaaccctaaagggagcccccgatttagagcttgacggggaaaccggcgaacgtggcgagaaaggaagggaagaaagcgaaaggagcgggcgctagggcgctggcaagtgtagcggtcacgctgcgcgtaaccaccacacccgccgcgctaagcgccgctacagggcgcgtcccttcgccttcaggctgcgtcgagtactgtactgtgagccagagttgcccggcgctctccggctgcggtagttcaggcagttcaatcaactgtttaccttgtggagcgactccagaggcacttcaccgcttgccagcggcttacgatccagcgccacgatccagtgcaggagatcgttatcgctatacggaacaggtattcgctggtcacttcgataaggtttgcccggataaacggaactggaaaaactgctgctggtgttttgcttccgtcagtgctggatcggcgtgcggtcggcaaagaccagaccgttctaacagaactggcgattgttcggcgtatcgccaaaatcaccgccgtaagccgaccacgggttgccgttttcagcaggatttaatcagcgactgatccacccagtcccagacgaagccgccctgtaaacggggatactgacgaaacgcctgccagtatttagcgaaaccgccaagactgttacccaagcgtgggcgtattcgcaaaggatcagcgggcgcgtctctccaggtagcgaaagccttttttgatcgacctttcggcacagccgggaagggctggtcttcaaccacgcgcgcgtacaacgggcaaataatatcggtggccgtggtgtcggctccgccgccttcaactgcaccgggcgggaaggatcgacagatttgatccagcgatacagcgcgtcgtgattagcgccgtggcctgattcaattccccagcgaccagtagatcacactcgggtgattacgattgcgctgcaccagtcgcgttacggttcgctcttcgccggtagccagcgcggatcacggtcagacgattcgttggcacgatccgtgggtttcaatactggcttcaaaccaccactaacaggccgtagcggtcgcacagcgtgtaccacagcggttggttcggataatcgaacagcgcacggcgttaaagttgttctgcttcaacagcaggatattctgcaccttcgtctgctcttcctaacctgaccaagcagaggatctgctcgtgacggttaatcctcgaatcagcaacggcttgccgttcagcagcagcagaccaagttcaatccgcacctcgcggaaaccgacaacgcaggcttctgcttcaatcagcgtgccgtcggcggtgtgcagttcaaccaccgcacgatagagattcgggatttcggcgctccacagtttcgggttttcgacgttcagacgtagtgtgacgcgatctgcaaaccaccacgctcaacgataatttcaccgccgaaaggcgcggtgccgctggcgacctgcgtttcaccctgccagaaagaaactgttacccgtaggtagtcacgcaactcgccgcacactgaacttcagcctccagtacagcgcggctgaaatcgtcttaaagcgagtggcaactggaaatcgctgatttgtgtagtcggtttagcagcaacgagacttcacggaaaatccgctaatccgccacagatcctgatcttccagataactgccgtcactccaacgcagcaccttcaccgcgaggcggttttctccggcgcgtaaaaatcgctcaggtcaaattcagacggcaaacgactgtcctggccgtaaccgacccagcgcccgttgcaccacagattgaaacgccgagtttacgcctcaaaaataattcgcgtctggccttcctgtagccagctttcacaactataatagtgagcgagtaacaacccgtcggattctccgtgggaacaaacggcggattgaccgtatagggataggttacgttggtgtagtagggcgctccgtaaccgtgctactgccagtttgaggggacgacgacagtatcggcctcaggaagatcgcactccagccagctttccggcaccgcttctggtactggaaaccaggcaaagcgcctatcgcctatcaggctgcacaactgttgggaagggcgatctgtgcgggcctcttcgctattacgccagcttgcgaaagggggtagtgctgcaaggcgattaagttgggtaacgccagggttttcccagtcacgacgtggatctgggccactccctct

SEQ ID NO: 508 - DNA, 9787 bp, synthetic construct
  source 1..9787: mol_type = other DNA
ctgcgcgctcgctcgctcactgaggccgcccgggcaaagcccgggcgtcgggcgacctttggtcgcccggcctcagtgagcgagcgagcgcgcagagagggagtggccaactccatcactaggggttcctggaggggtggagtcgtgacgtgaattacgtcatagggttagggaggtcggccgctctaggagttaatttttaaaaagcagtcaaaagtccaagtgcccttgcgagcatttactctctctgtttgctctggttaataatctcaggagcacaaacattccttactagttctaggagttaatttttaaaaagcagtcaaaagtccaagtgcccttgcgagcatttactctctctgtttgctctggttaataatctcaggagcacaaacattccttactagttctagagcggccgccagtgtgctggaattcggcttttttagggctggaagctacctttgacatcatttcctctgcgaatgcatgtataatttctacagaacctattagaaaggatcacccagcctctgcttttgtacaactttcccttaaaaaactgccaatcccactgctgtttggcccaatagtgagaactttttcctgctgcctcttggtgcttttgcctatggcccctattctgcctgctgaagacactcttgccagcatggacttaaacccctccagctctgacaatcctctttctcttttgttttacatgaagggtctggcagccaaagcaatcactcaaagttcaaaccttatcattttttgctttgttcctcttggccttggttttgtacatcagctttgaaaataccatcccagggttaatgctggggttaatttataactgagagtgctctagttctgcaatacaggacatgctataaaaatggaaagatgttgctttctgagagatcaggtggattcttgggcatttgcttaagcttggtaccttttttatgggagtgaggcacccgccctgctcccaccggctcctggccgtctgcgccctcgtgtccttggcaaccgccatggagtttgggctgagctgggtctttctggtggccctgctgaagggagtccagtgtgagcagcagggagccagcagaccagggccccgggatgcccaggcacaccccggccgtcccagagcagtgcccacacagtgcgacgtcccccccaacagccgcttcgattgcgcccctgacaaggccatcacccaggaacagtgcgaggcccgcggctgctgctacatccctgcaaagcaggggctgcagggagcccagatggggcagccctggtgcttcttcccacccagctaccccagctacaagctggagaacctgagctcctctgaaatgggctacacggccaccctgacccgtaccacccccaccttcttccccaaggacatcctgaccctgcggctggacgtgatgatggagactgagaaccgcctccacttcacgatcaaagatccagctaacaggcgctacgaggtgcccttggagaccccgcgtgtccacagccgggcaccgtccccactctacagcgtggagttctccgaggagcccttcggggtgatcgtgcaccggcagctggacggccgcgtgctgctgaacacgacggtggcgcccctgttctttgcggaccagttccttcagctgtccacctcgctgccctcgcagtatatcacaggcctcgccgagcacctcagtcccctgatgctcagcaccagctggaccaggatcaccctgtggaaccgggaccttgcgcccacgcccggtgcgaacctctacgggtctcaccctttctacctggcgctggaggacggcgggtcggcacacggggtgttcctgctaaacagcaatgccatggatgtggtcctgcagccgagccctgcccttagctggaggtcgacaggtgggatcctggatgtctacatcttcctgggcccagagcccaagagcgtggtgcagcagtacctggacgttgtgggatacccgttcatgccgccatactggggcctgggcttccacctgtgccgctggggctactcctccaccgctatcacccgccaggtggtggagaacatgaccagggcccacttccccctggacgtccaatggaacgacctggactacatggactcccggagggacttcacgttcaacaaggatggcttccgggacttcccggccatggtgcaggagctgcaccagggcggccggcgctacatgatgatcgtggatcctgccatcagcagctcgggccctgccgggagctacaggccctacgacgagggtctgcggaggggggttttcatcaccaacgagaccggccagccgctgattgggaaggtatggcccgggtccactgccttccccgacttcaccaaccccacagccctggcctggtgggaggacatggtggctgagttccatgaccaggtgcccttcgacggcatgtggattgacatgaacgagccttccaacttcatcagaggctctgaggacggctgccccaacaatgagctggagaacccaccctacgtgcctggggtggttggggggaccctccaggcggccaccatctgtgcctccagccaccagtttctctccacacactacaacctgcacaacctctacggcctgaccgaagccatcgcctcccacagggcgctggtgaaggctcgggggacacgcccatttgtgatctcccgctcgacctttgctggccacggccgatacgccggccactggacgggggacgtgtggagctcctgggagcagctcgcctcctccgtgccagaaatcctgcagtttaacctgctgggggtgcctctggtcggggccgacgtctgcggcttcctgggcaacacctcagaggagctgtgtgtgcgctggacccagctgggggccttctaccccttcatgcggaaccacaacagcctgctcagtctgccccaggagccgtacagcttcagcgagccggcccagcaggccatgaggaaggccctcaccctgcgctacgcactcctcccccacctctacacactgttccaccaggcccacgtcgcgggggagaccgtggcccggcccctcttcctggagttccccaaggactctagcacctggactgtggaccaccagctcctgtggggggaggccctgctcatcaccccagtgctccaggccgggaaggccgaagtgactggctacttccccttgggcacatggtacgacctgcagacggtgccaatagaggcccttggcagcctcccacccccacctgcagctccccgtgagccagccatccacagcgaggggcagtgggtgacgctgccggcccccctggacaccatcaacgtccacctccgggctgggtacatcatccccctgcagggccctggcctcacaaccacagagtcccgccagcagcccatggccctggctgtggccctgaccaagggtggagaggcccgaggggagctgttctgggacgatggagagagcctggaagtgctggagcgaggggcctacacacaggtcatcttcctggccaggaataacacgatcgtgaatgagctggtacgtgtgaccagtgagggagctggcctgcagctgcagaaggtgactgtcctgggcgtggccacggcgccccagcaggtcctctccaacggtgtccctgtctccaacttcacctacagccccgacaccaaggtcctggacatctgtgtctcgctgttgatgggagagcagtttctcgtcagctggtgttagccgggcggagtgtgttagtctctccagagggaggctggttccccagggaagcagagcctgtgtgcgggcagcagctgtgtgcgggcctgggggttgttaagtgcaattatttttaataaaaggggcatttggaaaaaaaaaaaaaaggtagcagtcgacagatgaattctgcagatctgtggcttctagctgcccgggtggcatccctgtgacccctccccagtgcctctcctggccctggaagttgccactccagtgcccaccagccttgtcctaataaaattaagttgcatcattttgtctgactaggtgtccttctataatattatggggtggaggggggtggtatggagcaaggggcaagttgggaagacaacctgagttgttgggattccaggcatcgagtagataagtagcatggcgggttaatcattaactacaaggaacccctagtgatggagttggccactccctctctgcgcgctcgctcgctcactgaggccgggcgaccaaaggtcgcccgacgcccgggctttgcccgggcggcctcagtgagcgagcgagcgcgcagagagggacagatccgaagccgggcaaatcagcgcctggcagcagtggcgtctggcggaaaacctcagtgtgacgctccccgccgcgtcccacgcttgttcccggatctgaccaccagcgaaatccgatttttgcaccgagctgggtaataagcgttggcaatttaaccgccagtcaggctttctttcacagtgtggattggcgataaaaaacaactgctgacgccgctgcgcgatcagttcacccgttcaccgctggataacgacttggcgtaagtgaagcgacccgtaagaccctaacgcctgggtcgaacgctggaaggcggcgggccaaaccaggccgaagcagcgttgttgcagttcacggcagatacacttgctgttgcggtgctgattacgaccgctcactcgtggcagcaacaggggaaaaccttatttatcagccggaaaacctaccggattgttggtagtggtcaataggcgattaccgttgtgttgaagtggcgagcgatacaccgcttccggcgcggattggcctgaactgccaactggcgcaggtagcagagcgggtaaactggctcggattagggccgcaagaaaactatcccgaccgccttactgccgcctgttttgaccgctgggatctgccaagtcagacagtatagcccgtacgtcttcccgagcgaaaacggtctgcgctgcgggacgcgcgaattgaatttggcccacaccagtggcgcggcgacttccagttcaatatcagccgctacagtgaacagcaactgttggaaaccagccttcgccaactgctgcacgcggaagaaggcactggctgaatatcgacggtttccagttggggattggtggcgacgactcctggagcccgtcagtatcggcggacttccaactgagcgccggtcgctaccttaccagttggtctggtgtcaaaaagcgtccgcttgagtctagcgatcgcgcgcagatctgtcatgtgagcaaaaggccagcaaaaggccaggaaccgtaaaaaggccgcgttgctggcgtttttccataggctccgcccccctgacgagcatcacaaaaatcgacgctcaagtcagaggtggcgaaacccgacaggactataaagataccaggcgtttccccctggaagctccctcgtgcgctctcctgttccgaccctgccgcttaccggatacctgtccgcctttctcccttcgggaagcgtggcgctttctcatagctcacgctgtaggtatctcagttcggtgtaggtcgttcgctccaagctgggctgtgtgcacgaaccccccgttcagcccgaccgctgcgccttatccggtaactatcgtcttgagtccaacccggtaagacacgacttatcgccactggcagcagccactggtaacaggattagcagagcgaggtatgtaggcggtgctacagagttcttgaagtggtggcctaactacggctacactagaagaacagtatttggtatctgcgctctgctgaagccagttaccttcggaaaaagagttggtagctcttgatccggcaaacaaaccaccgctggtagcggtggtttttttgtttgcaagcagcagattacgcgcagaaaaaaaggatctcaagaagatcctttgatcttttctacggggtctgacgctcagtggaacgaaaactcacgttaagggattttggtcatgagattatcaaaaaggatcttcacctagatccttttcacgtagaaagccagtccgcagaaacggtgctgaccccggatgaatgtcagctactgggctatctggacaagggaaaacgcaagcgcaaagagaaagcaggtagcttgcagtgggcttacatggcgatagctagactgggcggttttatggacagcaagcgaaccggaattgccagctggggcgccctctggtaaggttgggaagccctgcaaagtaaactggatggctttcttgccgccaaggatctgatggcgcaggggatcaagatctgatcaagagacaggatgaggatcgtttcgcatgattgaacaagatggattgcacgcaggttctccggccgcttgggtggagaggctattcggctatgactgggcacaacagacaatcggctgctctgatgccgccgtgttccggctgtcagcgcaggggcgcccggttctttttgtcaagaccgacctgtccggtgccctgaatgaactgcaagacgaggcagcgcggctatcgtggctggccacgacgggcgttccttgcgcagctgtgctcgacgttgtcactgaagcgggaagggactggctgctattgggcgaagtgccggggcaggatctcctgtcatctcaccttgctcctgccgagaaagtatccatcatggctgatgcaatgcggcggctgcatacgcttgatccggctacctgcccattcgaccaccaagcgaaacatcgcatcgagcgagcacgtactcggatggaagccggtcttgtcgatcaggatgatctggacgaagagcatcaggggctcgcgccagccgaactgttcgccaggctcaaggcgagcatgcccgacggcgaggatctcgtcgtgacccatggcgatgcctgcttgccgaatatcatggtggaaaatggccgcttttctggattcatcgactgtggccggctgggtgtggcggaccgctatcaggacatagcgttggctacccgtgatattgctgaagagcttggcggcgaatgggctgaccgcttcctcgtgctttacggtatcgccgctcccgattcgcagcgcatcgccttctatcgccttcttgacgagttcttctgaatttaaagcccaatacgcaaaccgcctctccccgcgcgttggccgaagcggttcaatattttgttaaaattcgcgttaaatttttgttaaatcagctattttttaaccaataggccgaaatcggcaaaatcccttgtaaatcaaaagaatagaccgagatagggttgagtgttgttccagtttggaacaagagtccactattaaagaacgtggactccaacgtcaaagggcgaaaaaccgtctatcagggcgttggcccactacgtgaaccttcaccctaatcaagttttttggggtcgaggtgccgtaaagcactaaatcggaaccctaaagggagcccccgatttagagcttgacggggaaaccggcgaacgtggcgagaaaggaagggaagaaagcgaaaggagcgggcgctagggcgctggcaagtgtagcggtcacgctgcgcgtaaccaccacacccgccgcgctaagcgccgctacagggcgcgtcccttcgccttcaggctgcgtcgagtactgtactgtgagccagagttgcccggcgctctccggctgcggtagttcaggcagttcaatcaactgtttaccttgtggagcgactccagaggcacttcaccgcttgccagcggcttacgatccagcgccacgatccagtgcaggagatcgttatcgctatacggaacaggtattcgctggtcacttcgataaggtttgcccggataaacggaactggaaaaactgctgctggtgttttgcttccgtcagtgctggatcggcgtgcggtcggcaaagaccagaccgttctaacagaactggcgattgttcggcgtatcgccaaaatcaccgccgtaagccgaccacgggttgccgttttcagcaggatttaatcagcgactgatccacccagtcccagacgaagccgccctgtaaacggggatactgacgaaacgcctgccagtatttagcgaaaccgccaagactgttacccaagcgtgggcgtattcgcaaaggatcagcgggcgcgtctctccaggtagcgaaagccttttttgatcgacctttcggcacagccgggaagggctggtcttcaaccacgcgcgcgtacaacgggcaaataatatcggtggccgtggtgtcggctccgccgccttcaactgcaccgggcgggaaggatcgacagatttgatccagcgatacagcgcgtcgtgattagcgccgtggcctgattcaattccccagcgaccagtagatcacactcgggtgattacgattgcgctgcaccagtcgcgttacggttcgctcttcgccggtagccagcgcggatcacggtcagacgattcgttggcacgatccgtgggtttcaatactggcttcaaaccaccactaacaggccgtagcggtcgcacagcgtgtaccacagcggttggttcggataatcgaacagcgcacggcgttaaagttgttctgcttcaacagcaggatattctgcaccttcgtctgctcttcctaacctgaccaagcagaggatctgctcgtgacggttaatcctcgaatcagcaacggcttgccgttcagcagcagcagaccaagttcaatccgcacctcgcggaaaccgacaacgcaggcttctgcttcaatcagcgtgccgtcggcggtgtgcagttcaaccaccgcacgatagagattcgggatttcggcgctccacagtttcgggttttcgacgttcagacgtagtgtgacgcgatctgcaaaccaccacgctcaacgataatttcaccgccgaaaggcgcggtgccgctggcgacctgcgtttcaccctgccagaaagaaactgttacccgtaggtagtcacgcaactcgccgcacactgaacttcagcctccagtacagcgcggctgaaatcgtcttaaagcgagtggcaactggaaatcgctgatttgtgtagtcggtttagcagcaacgagacttcacggaaaatccgctaatccgccacagatcctgatcttccagataactgccgtcactccaacgcagcaccttcaccgcgaggcggttttctccggcgcgtaaaaatcgctcaggtcaaattcagacggcaaacgactgtcctggccgtaaccgacccagcgcccgttgcaccacagattgaaacgccgagtttacgcctcaaaaataattcgcgtctggccttcctgtagccagctttcacaactataatagtgagcgagtaacaacccgtcggattctccgtgggaacaaacggcggattgaccgtatagggataggttacgttggtgtagtagggcgctccgtaaccgtgctactgccagtttgaggggacgacgacagtatcggcctcaggaagatcgcactccagccagctttccggcaccgcttctggtactggaaaccaggcaaagcgcctatcgcctatcaggctgcacaactgttgggaagggcgatctgtgcgggcctcttcgctattacgccagcttgcgaaagggggtagtgctgcaaggcgattaagttgggtaacgccagggttttcccagtcacgacgtggatctgggccactccctct

SEQ ID NO: 509 - DNA, 9828 bp, synthetic construct
  source 1..9828: mol_type = other DNA
ctgcgcgctcgctcgctcactgaggccgcccgggcaaagcccgggcgtcgggcgacctttggtcgcccggcctcagtgagcgagcgagcgcgcagagagggagtggccaactccatcactaggggttcctggaggggtggagtcgtgacgtgaattacgtcatagggttagggaggtcggccgctctaggagttaatttttaaaaagcagtcaaaagtccaagtgcccttgcgagcatttactctctctgtttgctctggttaataatctcaggagcacaaacattccttactagttctaggagttaatttttaaaaagcagtcaaaagtccaagtgcccttgcgagcatttactctctctgtttgctctggttaataatctcaggagcacaaacattccttactagttctagagcggccgccagtgtgctggaattcggcttttttagggctggaagctacctttgacatcatttcctctgcgaatgcatgtataatttctacagaacctattagaaaggatcacccagcctctgcttttgtacaactttcccttaaaaaactgccaatcccactgctgtttggcccaatagtgagaactttttcctgctgcctcttggtgcttttgcctatggcccctattctgcctgctgaagacactcttgccagcatggacttaaacccctccagctctgacaatcctctttctcttttgttttacatgaagggtctggcagccaaagcaatcactcaaagttcaaaccttatcattttttgctttgttcctcttggccttggttttgtacatcagctttgaaaataccatcccagggttaatgctggggttaatttataactgagagtgctctagttctgcaatacaggacatgctataaaaatggaaagatgttgctttctgagagatcagcttacatgtggtaccgagctcggatccactagtaacggccgccagtgtgctggaattcggctttccaggccatctttttttatgggggtgaggcaccctccctgttctcacaggctgctggctgtgtgtgctctggtgtctctggccactgccatggagtttgggctgagctgggtctttctggtggccctgctgaagggagtccagtgtgagcagcagggagccagcagaccagggccccgggatgcccaggcacaccccggccgtcccagagcagtgcccacacagtgcgacgtcccccccaacagccgcttcgattgcgcccctgacaaggccatcacccaggaacagtgcgaggcccgcggctgctgctacatccctgcaaagcaggggctgcagggagcccagatggggcagccctggtgcttcttcccacccagctaccccagctacaagctggagaacctgagctcctctgaaatgggctacacggccaccctgacccgtaccacccccaccttcttccccaaggacatcctgaccctgcggctggacgtgatgatggagactgagaaccgcctccacttcacgatcaaagatccagctaacaggcgctacgaggtgcccttggagaccccgcgtgtccacagccgggcaccgtccccactctacagcgtggagttctccgaggagcccttcggggtgatcgtgcaccggcagctggacggccgcgtgctgctgaacacgacggtggcgcccctgttctttgcggaccagttccttcagctgtccacctcgctgccctcgcagtatatcacaggcctcgccgagcacctcagtcccctgatgctcagcaccagctggaccaggatcaccctgtggaaccgggaccttgcgcccacgcccggtgcgaacctctacgggtctcaccctttctacctggcgctggaggacggcgggtcggcacacggggtgttcctgctaaacagcaatgccatggatgtggtcctgcagccgagccctgcccttagctggaggtcgacaggtgggatcctggatgtctacatcttcctgggcccagagcccaagagcgtggtgcagcagtacctggacgttgtgggatacccgttcatgccgccatactggggcctgggcttccacctgtgccgctggggctactcctccaccgctatcacccgccaggtggtggagaacatgaccagggcccacttccccctggacgtccaatggaacgacctggactacatggactcccggagggacttcacgttcaacaaggatggcttccgggacttcccggccatggtgcaggagctgcaccagggcggccggcgctacatgatgatcgtggatcctgccatcagcagctcgggccctgccgggagctacaggccctacgacgagggtctgcggaggggggttttcatcaccaacgagaccggccagccgctgattgggaaggtatggcccgggtccactgccttccccgacttcaccaaccccacagccctggcctggtgggaggacatggtggctgagttccatgaccaggtgcccttcgacggcatgtggattgacatgaacgagccttccaacttcatcagaggctctgaggacggctgccccaacaatgagctggagaacccaccctacgtgcctggggtggttggggggaccctccaggcggccaccatctgtgcctccagccaccagtttctctccacacactacaacctgcacaacctctacggcctgaccgaagccatcgcctcccacagggcgctggtgaaggctcgggggacacgcccatttgtgatctcccgctcgacctttgctggccacggccgatacgccggccactggacgggggacgtgtggagctcctgggagcagctcgcctcctccgtgccagaaatcctgcagtttaacctgctgggggtgcctctggtcggggccgacgtctgcggcttcctgggcaacacctcagaggagctgtgtgtgcgctggacccagctgggggccttctaccccttcatgcggaaccacaacagcctgctcagtctgccccaggagccgtacagcttcagcgagccggcccagcaggccatgaggaaggccctcaccctgcgctacgcactcctcccccacctctacacactgttccaccaggcccacgtcgcgggggagaccgtggcccggcccctcttcctggagttccccaaggactctagcacctggactgtggaccaccagctcctgtggggggaggccctgctcatcaccccagtgctccaggccgggaaggccgaagtgactggctacttccccttgggcacatggtacgacctgcagacggtgccaatagaggcccttggcagcctcccacccccacctgcagctccccgtgagccagccatccacagcgaggggcagtgggtgacgctgccggcccccctggacaccatcaacgtccacctccgggctgggtacatcatccccctgcagggccctggcctcacaaccacagagtcccgccagcagcccatggccctggctgtggccctgaccaagggtggagaggcccgaggggagctgttctgggacgatggagagagcctggaagtgctggagcgaggggcctacacacaggtcatcttcctggccaggaataacacgatcgtgaatgagctggtacgtgtgaccagtgagggagctggcctgcagctgcagaaggtgactgtcctgggcgtggccacggcgccccagcaggtcctctccaacggtgtccctgtctccaacttcacctacagccccgacaccaaggtcctggacatctgtgtctcgctgttgatgggagagcagtttctcgtcagctggtgttagccgggcggagtgtgttagtctctccagagggaggctggttccccagggaagcagagcctgtgtgcgggcagcagctgtgtgcgggcctgggggttgttaagtgcaattatttttaataaaaggggcatttggaaaaaaaaaaaaaaggtagcagtcgacagatgaattctgcagatctgtggcttctagctgcccgggtggcatccctgtgacccctccccagtgcctctcctggccctggaagttgccactccagtgcccaccagccttgtcctaataaaattaagttgcatcattttgtctgactaggtgtccttctataatattatggggtggaggggggtggtatggagcaaggggcaagttgggaagacaacctgagttgttgggattccaggcatcgagtagataagtagcatggcgggttaatcattaactacaaggaacccctagtgatggagttggccactccctctctgcgcgctcgctcgctcactgaggccgggcgaccaaaggtcgcccgacgcccgggctttgcccgggcggcctcagtgagcgagcgagcgcgcagagagggacagatccgaagccgggcaaatcagcgcctggcagcagtggcgtctggcggaaaacctcagtgtgacgctccccgccgcgtcccacgcttgttcccggatctgaccaccagcgaaatccgatttttgcaccgagctgggtaataagcgttggcaatttaaccgccagtcaggctttctttcacagtgtggattggcgataaaaaacaactgctgacgccgctgcgcgatcagttcacccgttcaccgctggataacgacttggcgtaagtgaagcgacccgtaagaccctaacgcctgggtcgaacgctggaaggcggcgggccaaaccaggccgaagcagcgttgttgcagttcacggcagatacacttgctgttgcggtgctgattacgaccgctcactcgtggcagcaacaggggaaaaccttatttatcagccggaaaacctaccggattgttggtagtggtcaataggcgattaccgttgtgttgaagtggcgagcgatacaccgcttccggcgcggattggcctgaactgccaactggcgcaggtagcagagcgggtaaactggctcggattagggccgcaagaaaactatcccgaccgccttactgccgcctgttttgaccgctgggatctgccaagtcagacagtatagcccgtacgtcttcccgagcgaaaacggtctgcgctgcgggacgcgcgaattgaatttggcccacaccagtggcgcggcgacttccagttcaatatcagccgctacagtgaacagcaactgttggaaaccagccttcgccaactgctgcacgcggaagaaggcactggctgaatatcgacggtttccagttggggattggtggcgacgactcctggagcccgtcagtatcggcggacttccaactgagcgccggtcgctaccttaccagttggtctggtgtcaaaaagcgtccgcttgagtctagcgatcgcgcgcagatctgtcatgtgagcaaaaggccagcaaaaggccaggaaccgtaaaaaggccgcgttgctggcgtttttccataggctccgcccccctgacgagcatcacaaaaatcgacgctcaagtcagaggtggcgaaacccgacaggactataaagataccaggcgtttccccctggaagctccctcgtgcgctctcctgttccgaccctgccgcttaccggatacctgtccgcctttctcccttcgggaagcgtggcgctttctcatagctcacgctgtaggtatctcagttcggtgtaggtcgttcgctccaagctgggctgtgtgcacgaaccccccgttcagcccgaccgctgcgccttatccggtaactatcgtcttgagtccaacccggtaagacacgacttatcgccactggcagcagccactggtaacaggattagcagagcgaggtatgtaggcggtgctacagagttcttgaagtggtggcctaactacggctacactagaagaacagtatttggtatctgcgctctgctgaagccagttaccttcggaaaaagagttggtagctcttgatccggcaaacaaaccaccgctggtagcggtggtttttttgtttgcaagcagcagattacgcgcagaaaaaaaggatctcaagaagatcctttgatcttttctacggggtctgacgctcagtggaacgaaaactcacgttaagggattttggtcatgagattatcaaaaaggatcttcacctagatccttttcacgtagaaagccagtccgcagaaacggtgctgaccccggatgaatgtcagctactgggctatctggacaagggaaaacgcaagcgcaaagagaaagcaggtagcttgcagtgggcttacatggcgatagctagactgggcggttttatggacagcaagcgaaccggaattgccagctggggcgccctctggtaaggttgggaagccctgcaaagtaaactggatggctttcttgccgccaaggatctgatggcgcaggggatcaagatctgatcaagagacaggatgaggatcgtttcgcatgattgaacaagatggattgcacgcaggttctccggccgcttgggtggagaggctattcggctatgactgggcacaacagacaatcggctgctctgatgccgccgtgttccggctgtcagcgcaggggcgcccggttctttttgtcaagaccgacctgtccggtgccctgaatgaactgcaagacgaggcagcgcggctatcgtggctggccacgacgggcgttccttgcgcagctgtgctcgacgttgtcactgaagcgggaagggactggctgctattgggcgaagtgccggggcaggatctcctgtcatctcaccttgctcctgccgagaaagtatccatcatggctgatgcaatgcggcggctgcatacgcttgatccggctacctgcccattcgaccaccaagcgaaacatcgcatcgagcgagcacgtactcggatggaagccggtcttgtcgatcaggatgatctggacgaagagcatcaggggctcgcgccagccgaactgttcgccaggctcaaggcgagcatgcccgacggcgaggatctcgtcgtgacccatggcgatgcctgcttgccgaatatcatggtggaaaatggccgcttttctggattcatcgactgtggccggctgggtgtggcggaccgctatcaggacatagcgttggctacccgtgatattgctgaagagcttggcggcgaatgggctgaccgcttcctcgtgctttacggtatcgccgctcccgattcgcagcgcatcgccttctatcgccttcttgacgagttcttctgaatttaaagcccaatacgcaaaccgcctctccccgcgcgttggccgaagcggttcaatattttgttaaaattcgcgttaaatttttgttaaatcagctattttttaaccaataggccgaaatcggcaaaatcccttgtaaatcaaaagaatagaccgagatagggttgagtgttgttccagtttggaacaagagtccactattaaagaacgtggactccaacgtcaaagggcgaaaaaccgtctatcagggcgttggcccactacgtgaaccttcaccctaatcaagttttttggggtcgaggtgccgtaaagcactaaatcggaaccctaaagggagcccccgatttagagcttgacggggaaaccggcgaacgtggcgagaaaggaagggaagaaagcgaaaggagcgggcgctagggcgctggcaagtgtagcggtcacgctgcgcgtaaccaccacacccgccgcgctaagcgccgctacagggcgcgtcccttcgccttcaggctgcgtcgagtactgtactgtgagccagagttgcccggcgctctccggctgcggtagttcaggcagttcaatcaactgtttaccttgtggagcgactccagaggcacttcaccgcttgccagcggcttacgatccagcgccacgatccagtgcaggagatcgttatcgctatacggaacaggtattcgctggtcacttcgataaggtttgcccggataaacggaactggaaaaactgctgctggtgttttgcttccgtcagtgctggatcggcgtgcggtcggcaaagaccagaccgttctaacagaactggcgattgttcggcgtatcgccaaaatcaccgccgtaagccgaccacgggttgccgttttcagcaggatttaatcagcgactgatccacccagtcccagacgaagccgccctgtaaacggggatactgacgaaacgcctgccagtatttagcgaaaccgccaagactgttacccaagcgtgggcgtattcgcaaaggatcagcgggcgcgtctctccaggtagcgaaagccttttttgatcgacctttcggcacagccgggaagggctggtcttcaaccacgcgcgcgtacaacgggcaaataatatcggtggccgtggtgtcggctccgccgccttcaactgcaccgggcgggaaggatcgacagatttgatccagcgatacagcgcgtcgtgattagcgccgtggcctgattcaattccccagcgaccagtagatcacactcgggtgattacgattgcgctgcaccagtcgcgttacggttcgctcttcgccggtagccagcgcggatcacggtcagacgattcgttggcacgatccgtgggtttcaatactggcttcaaaccaccactaacaggccgtagcggtcgcacagcgtgtaccacagcggttggttcggataatcgaacagcgcacggcgttaaagttgttctgcttcaacagcaggatattctgcaccttcgtctgctcttcctaacctgaccaagcagaggatctgctcgtgacggttaatcctcgaatcagcaacggcttgccgttcagcagcagcagaccaagttcaatccgcacctcgcggaaaccgacaacgcaggcttctgcttcaatcagcgtgccgtcggcggtgtgcagttcaaccaccgcacgatagagattcgggatttcggcgctccacagtttcgggttttcgacgttcagacgtagtgtgacgcgatctgcaaaccaccacgctcaacgataatttcaccgccgaaaggcgcggtgccgctggcgacctgcgtttcaccctgccagaaagaaactgttacccgtaggtagtcacgcaactcgccgcacactgaacttcagcctccagtacagcgcggctgaaatcgtcttaaagcgagtggcaactggaaatcgctgatttgtgtagtcggtttagcagcaacgagacttcacggaaaatccgctaatccgccacagatcctgatcttccagataactgccgtcactccaacgcagcaccttcaccgcgaggcggttttctccggcgcgtaaaaatcgctcaggtcaaattcagacggcaaacgactgtcctggccgtaaccgacccagcgcccgttgcaccacagattgaaacgccgagtttacgcctcaaaaataattcgcgtctggccttcctgtagccagctttcacaactataatagtgagcgagtaacaacccgtcggattctccgtgggaacaaacggcggattgaccgtatagggataggttacgttggtgtagtagggcgctccgtaaccgtgctactgccagtttgaggggacgacgacagtatcggcctcaggaagatcgcactccagccagctttccggcaccgcttctggtactggaaaccaggcaaagcgcctatcgcctatcaggctgcacaactgttgggaagggcgatctgtgcgggcctcttcgctattacgccagcttgcgaaagggggtagtgctgcaaggcgattaagttgggtaacgccagggttttcccagtcacgacgtggatctgggccactccctct

SEQ ID NO: 510 - DNA, 9787 bp, synthetic construct
  source 1..9787: mol_type = other DNA
ctgcgcgctcgctcgctcactgaggccgcccgggcaaagcccgggcgtcgggcgacctttggtcgcccggcctcagtgagcgagcgagcgcgcagagagggagtggccaactccatcactaggggttcctggaggggtggagtcgtgacgtgaattacgtcatagggttagggaggtcggccgctctaggagttaatttttaaaaagcagtcaaaagtccaagtgcccttgcgagcatttactctctctgtttgctctggttaataatctcaggagcacaaacattccttactagttctaggagttaatttttaaaaagcagtcaaaagtccaagtgcccttgcgagcatttactctctctgtttgctctggttaataatctcaggagcacaaacattccttactagttctagagcggccgccagtgtgctggaattcggcttttttagggctggaagctacctttgacatcatttcctctgcgaatgcatgtataatttctacagaacctattagaaaggatcacccagcctctgcttttgtacaactttcccttaaaaaactgccaatcccactgctgtttggcccaatagtgagaactttttcctgctgcctcttggtgcttttgcctatggcccctattctgcctgctgaagacactcttgccagcatggacttaaacccctccagctctgacaatcctctttctcttttgttttacatgaagggtctggcagccaaagcaatcactcaaagttcaaaccttatcattttttgctttgttcctcttggccttggttttgtacatcagctttgaaaataccatcccagggttaatgctggggttaatttataactgagagtgctctagttctgcaatacaggacatgctataaaaatggaaagatgttgctttctgagagatcaggtggattcttgggcatttgcttaagcttggtaccttttttatgggggtgaggcaccctccctgttctcacaggctgctggctgtgtgtgctctggtgtctctggccactgccatggagtttgggctgagctgggtctttctggtggccctgctgaagggagtccagtgtgagcagcagggagccagcagaccagggccccgggatgcccaggcacaccccggccgtcccagagcagtgcccacacagtgcgacgtcccccccaacagccgcttcgattgcgcccctgacaaggccatcacccaggaacagtgcgaggcccgcggctgctgctacatccctgcaaagcaggggctgcagggagcccagatggggcagccctggtgcttcttcccacccagctaccccagctacaagctggagaacctgagctcctctgaaatgggctacacggccaccctgacccgtaccacccccaccttcttccccaaggacatcctgaccctgcggctggacgtgatgatggagactgagaaccgcctccacttcacgatcaaagatccagctaacaggcgctacgaggtgcccttggagaccccgcgtgtccacagccgggcaccgtccccactctacagcgtggagttctccgaggagcccttcggggtgatcgtgcaccggcagctggacggccgcgtgctgctgaacacgacggtggcgcccctgttctttgcggaccagttccttcagctgtccacctcgctgccctcgcagtatatcacaggcctcgccgagcacctcagtcccctgatgctcagcaccagctggaccaggatcaccctgtggaaccgggaccttgcgcccacgcccggtgcgaacctctacgggtctcaccctttctacctggcgctggaggacggcgggtcggcacacggggtgttcctgctaaacagcaatgccatggatgtggtcctgcagccgagccctgcccttagctggaggtcgacaggtgggatcctggatgtctacatcttcctgggcccagagcccaagagcgtggtgcagcagtacctggacgttgtgggatacccgttcatgccgccatactggggcctgggcttccacctgtgccgctggggctactcctccaccgctatcacccgccaggtggtggagaacatgaccagggcccacttccccctggacgtccaatggaacgacctggactacatggactcccggagggacttcacgttcaacaaggatggcttccgggacttcccggccatggtgcaggagctgcaccagggcggccggcgctacatgatgatcgtggatcctgccatcagcagctcgggccctgccgggagctacaggccctacgacgagggtctgcggaggggggttttcatcaccaacgagaccggccagccgctgattgggaaggtatggcccgggtccactgccttccccgacttcaccaaccccacagccctggcctggtgggaggacatggtggctgagttccatgaccaggtgcccttcgacggcatgtggattgacatgaacgagccttccaacttcatcagaggctctgaggacggctgccccaacaatgagctggagaacccaccctacgtgcctggggtggttggggggaccctccaggcggccaccatctgtgcctccagccaccagtttctctccacacactacaacctgcacaacctctacggcctgaccgaagccatcgcctcccacagggcgctggtgaaggctcgggggacacgcccatttgtgatctcccgctcgacctttgctggccacggccgatacgccggccactggacgggggacgtgtggagctcctgggagcagctcgcctcctccgtgccagaaatcctgcagtttaacctgctgggggtgcctctggtcggggccgacgtctgcggcttcctgggcaacacctcagaggagctgtgtgtgcgctggacccagctgggggccttctaccccttcatgcggaaccacaacagcctgctcagtctgccccaggagccgtacagcttcagcgagccggcccagcaggccatgaggaaggccctcaccctgcgctacgcactcctcccccacctctacacactgttccaccaggcccacgtcgcgggggagaccgtggcccggcccctcttcctggagttccccaaggactctagcacctggactgtggaccaccagctcctgtggggggaggccctgctcatcaccccagtgctccaggccgggaaggccgaagtgactggctacttccccttgggcacatggtacgacctgcagacggtgccaatagaggcccttggcagcctcccacccccacctgcagctccccgtgagccagccatccacagcgaggggcagtgggtgacgctgccggcccccctggacaccatcaacgtccacctccgggctgggtacatcatccccctgcagggccctggcctcacaaccacagagtcccgccagcagcccatggccctggctgtggccctgaccaagggtggagaggcccgaggggagctgttctgggacgatggagagagcctggaagtgctggagcgaggggcctacacacaggtcatcttcctggccaggaataacacgatcgtgaatgagctggtacgtgtgaccagtgagggagctggcctgcagctgcagaaggtgactgtcctgggcgtggccacggcgccccagcaggtcctctccaacggtgtccctgtctccaacttcacctacagccccgacaccaaggtcctggacatctgtgtctcgctgttgatgggagagcagtttctcgtcagctggtgttagccgggcggagtgtgttagtctctccagagggaggctggttccccagggaagcagagcctgtgtgcgggcagcagctgtgtgcgggcctgggggttgttaagtgcaattatttttaataaaaggggcatttggaaaaaaaaaaaaaaggtagcagtcgacagatgaattctgcagatctgtggcttctagctgcccgggtggcatccctgtgacccctccccagtgcctctcctggccctggaagttgccactccagtgcccaccagccttgtcctaataaaattaagttgcatcattttgtctgactaggtgtccttctataatattatggggtggaggggggtggtatggagcaaggggcaagttgggaagacaacctgagttgttgggattccaggcatcgagtagataagtagcatggcgggttaatcattaactacaaggaacccctagtgatggagttggccactccctctctgcgcgctcgctcgctcactgaggccgggcgaccaaaggtcgcccgacgcccgggctttgcccgggcggcctcagtgagcgagcgagcgcgcagagagggacagatccgaagccgggcaaatcagcgcctggcagcagtggcgtctggcggaaaacctcagtgtgacgctccccgccgcgtcccacgcttgttcccggatctgaccaccagcgaaatccgatttttgcaccgagctgggtaataagcgttggcaatttaaccgccagtcaggctttctttcacagtgtggattggcgataaaaaacaactgctgacgccgctgcgcgatcagttcacccgttcaccgctggataacgacttggcgtaagtgaagcgacccgtaagaccctaacgcctgggtcgaacgctggaaggcggcgggccaaaccaggccgaagcagcgttgttgcagttcacggcagatacacttgctgttgcggtgctgattacgaccgctcactcgtggcagcaacaggggaaaaccttatttatcagccggaaaacctaccggattgttggtagtggtcaataggcgattaccgttgtgttgaagtggcgagcgatacaccgcttccggcgcggattggcctgaactgccaactggcgcaggtagcagagcgggtaaactggctcggattagggccgcaagaaaactatcccgaccgccttactgccgcctgttttgaccgctgggatctgccaagtcagacagtatagcccgtacgtcttcccgagcgaaaacggtctgcgctgcgggacgcgcgaattgaatttggcccacaccagtggcgcggcgacttccagttcaatatcagccgctacagtgaacagcaactgttggaaaccagccttcgccaactgctgcacgcggaagaaggcactggctgaatatcgacggtttccagttggggattggtggcgacgactcctggagcccgtcagtatcggcggacttccaactgagcgccggtcgctaccttaccagttggtctggtgtcaaaaagcgtccgcttgagtctagcgatcgcgcgcagatctgtcatgtgagcaaaaggccagcaaaaggccaggaaccgtaaaaaggccgcgttgctggcgtttttccataggctccgcccccctgacgagcatcacaaaaatcgacgctcaagtcagaggtggcgaaacccgacaggactataaagataccaggcgtttccccctggaagctccctcgtgcgctctcctgttccgaccctgccgcttaccggatacctgtccgcctttctcccttcgggaagcgtggcgctttctcatagctcacgctgtaggtatctcagttcggtgtaggtcgttcgctccaagctgggctgtgtgcacgaaccccccgttcagcccgaccgctgcgccttatccggtaactatcgtcttgagtccaacccggtaagacacgacttatcgccactggcagcagccactggtaacaggattagcagagcgaggtatgtaggcggtgctacagagttcttgaagtggtggcctaactacggctacactagaagaacagtatttggtatctgcgctctgctgaagccagttaccttcggaaaaagagttggtagctcttgatccggcaaacaaaccaccgctggtagcggtggtttttttgtttgcaagcagcagattacgcgcagaaaaaaaggatctcaagaagatcctttgatcttttctacggggtctgacgctcagtggaacgaaaactcacgttaagggattttggtcatgagattatcaaaaaggatcttcacctagatccttttcacgtagaaagccagtccgcagaaacggtgctgaccccggatgaatgtcagctactgggctatctggacaagggaaaacgcaagcgcaaagagaaagcaggtagcttgcagtgggcttacatggcgatagctagactgggcggttttatggacagcaagcgaaccggaattgccagctggggcgccctctggtaaggttgggaagccctgcaaagtaaactggatggctttcttgccgccaaggatctgatggcgcaggggatcaagatctgatcaagagacaggatgaggatcgtttcgcatgattgaacaagatggattgcacgcaggttctccggccgcttgggtggagaggctattcggctatgactgggcacaacagacaatcggctgctctgatgccgccgtgttccggctgtcagcgcaggggcgcccggttctttttgtcaagaccgacctgtccggtgccctgaatgaactgcaagacgaggcagcgcggctatcgtggctggccacgacgggcgttccttgcgcagctgtgctcgacgttgtcactgaagcgggaagggactggctgctattgggcgaagtgccggggcaggatctcctgtcatctcaccttgctcctgccgagaaagtatccatcatggctgatgcaatgcggcggctgcatacgcttgatccggctacctgcccattcgaccaccaagcgaaacatcgcatcgagcgagcacgtactcggatggaagccggtcttgtcgatcaggatgatctggacgaagagcatcaggggctcgcgccagccgaactgttcgccaggctcaaggcgagcatgcccgacggcgaggatctcgtcgtgacccatggcgatgcctgcttgccgaatatcatggtggaaaatggccgcttttctggattcatcgactgtggccggctgggtgtggcggaccgctatcaggacatagcgttggctacccgtgatattgctgaagagcttggcggcgaatgggctgaccgcttcctcgtgctttacggtatcgccgctcccgattcgcagcgcatcgccttctatcgccttcttgacgagttcttctgaatttaaagcccaatacgcaaaccgcctctccccgcgcgttggccgaagcggttcaatattttgttaaaattcgcgttaaatttttgttaaatcagctattttttaaccaataggccgaaatcggcaaaatcccttgtaaatcaaaagaatagaccgagatagggttgagtgttgttccagtttggaacaagagtccactattaaagaacgtggactccaacgtcaaagggcgaaaaaccgtctatcagggcgttggcccactacgtgaaccttcaccctaatcaagttttttggggtcgaggtgccgtaaagcactaaatcggaaccctaaagggagcccccgatttagagcttgacggggaaaccggcgaacgtggcgagaaaggaagggaagaaagcgaaaggagcgggcgctagggcgctggcaagtgtagcggtcacgctgcgcgtaaccaccacacccgccgcgctaagcgccgctacagggcgcgtcccttcgccttcaggctgcgtcgagtactgtactgtgagccagagttgcccggcgctctccggctgcggtagttcaggcagttcaatcaactgtttaccttgtggagcgactccagaggcacttcaccgcttgccagcggcttacgatccagcgccacgatccagtgcaggagatcgttatcgctatacggaacaggtattcgctggtcacttcgataaggtttgcccggataaacggaactggaaaaactgctgctggtgttttgcttccgtcagtgctggatcggcgtgcggtcggcaaagaccagaccgttctaacagaactggcgattgttcggcgtatcgccaaaatcaccgccgtaagccgaccacgggttgccgttttcagcaggatttaatcagcgactgatccacccagtcccagacgaagccgccctgtaaacggggatactgacgaaacgcctgccagtatttagcgaaaccgccaagactgttacccaagcgtgggcgtattcgcaaaggatcagcgggcgcgtctctccaggtagcgaaagccttttttgatcgacctttcggcacagccgggaagggctggtcttcaaccacgcgcgcgtacaacgggcaaataatatcggtggccgtggtgtcggctccgccgccttcaactgcaccgggcgggaaggatcgacagatttgatccagcgatacagcgcgtcgtgattagcgccgtggcctgattcaattccccagcgaccagtagatcacactcgggtgattacgattgcgctgcaccagtcgcgttacggttcgctcttcgccggtagccagcgcggatcacggtcagacgattcgttggcacgatccgtgggtttcaatactggcttcaaaccaccactaacaggccgtagcggtcgcacagcgtgtaccacagcggttggttcggataatcgaacagcgcacggcgttaaagttgttctgcttcaacagcaggatattctgcaccttcgtctgctcttcctaacctgaccaagcagaggatctgctcgtgacggttaatcctcgaatcagcaacggcttgccgttcagcagcagcagaccaagttcaatccgcacctcgcggaaaccgacaacgcaggcttctgcttcaatcagcgtgccgtcggcggtgtgcagttcaaccaccgcacgatagagattcgggatttcggcgctccacagtttcgggttttcgacgttcagacgtagtgtgacgcgatctgcaaaccaccacgctcaacgataatttcaccgccgaaaggcgcggtgccgctggcgacctgcgtttcaccctgccagaaagaaactgttacccgtaggtagtcacgcaactcgccgcacactgaacttcagcctccagtacagcgcggctgaaatcgtcttaaagcgagtggcaactggaaatcgctgatttgtgtagtcggtttagcagcaacgagacttcacggaaaatccgctaatccgccacagatcctgatcttccagataactgccgtcactccaacgcagcaccttcaccgcgaggcggttttctccggcgcgtaaaaatcgctcaggtcaaattcagacggcaaacgactgtcctggccgtaaccgacccagcgcccgttgcaccacagattgaaacgccgagtttacgcctcaaaaataattcgcgtctggccttcctgtagccagctttcacaactataatagtgagcgagtaacaacccgtcggattctccgtgggaacaaacggcggattgaccgtatagggataggttacgttggtgtagtagggcgctccgtaaccgtgctactgccagtttgaggggacgacgacagtatcggcctcaggaagatcgcactccagccagctttccggcaccgcttctggtactggaaaccaggcaaagcgcctatcgcctatcaggctgcacaactgttgggaagggcgatctgtgcgggcctcttcgctattacgccagcttgcgaaagggggtagtgctgcaaggcgattaagttgggtaacgccagggttttcccagtcacgacgtggatctgggccactccctct

SEQ ID NO: 511 - DNA, 7688 bp, synthetic construct
  source 1..7688: mol_type = other DNA
ttgcccattatacgcgcgtataatggactattgtgtgctgatatctgtacacttaagggctagatcttagcttacgtcactagagggtccacgtttagtttttaagatccattgatctcctaaacgctgcaagattcgcaacctggtatacttagcctaggcgctaggtcctagtgcagcgggactttttttctaaagtcgttgagaggaggagtcgtcagaccagatagctttgatgtcctgatcggaaggatcgttggcccccctgcaggcagctgttaattaactgcgcgctcgctcgctcactgaggccgcccgggcaaagcccgggcgtcgggcgacctttggtcgcccggcctcagtgagcgagcgagcgcgcagagagggagtggccaactccatcactaggggttccttgtagttaatgattaacccgccatgctacttatctacggcgcgccacgcgtggaggggtggagtcgtgacgtgaattacgtcatagggttagggaggtcggccgctctaggagttaatttttaaaaagcagtcaaaagtccaagtgcccttgcgagcatttactctctctgtttgctctggttaataatctcaggagcacaaacattccttactagttctaggagttaatttttaaaaagcagtcaaaagtccaagtgcccttgcgagcatttactctctctgtttgctctggttaataatctcaggagcacaaacattccttactagttctagagcggccgccagtgtgctggaattcggcttttttagggctggaagctacctttgacatcatttcctctgcgaatgcatgtataatttctacagaacctattagaaaggatcacccagcctctgcttttgtacaactttcccttaaaaaactgccaatcccactgctgtttggcccaatagtgagaactttttcctgctgcctcttggtgcttttgcctatggcccctattctgcctgctgaagacactcttgccagcatggacttaaacccctccagctctgacaatcctctttctcttttgttttacatgaagggtctggcagccaaagcaatcactcaaagttcaaaccttatcattttttgctttgttcctcttggccttggttttgtacatcagctttgaaaataccatcccagggttaatgctggggttaatttataactgagagtgctctagttctgcaatacaggacatgctataaaaatggaaagatgttgctttctgagagatcagcttacatgtggtaccgagctcggatccactagtaacggccgccagtgtgctggaattcggctttccaggccatctttttttatgggagtgaggcacccgccctgctcccaccggctcctggccgtctgcgccctcgtgtccttggcaaccgccatggagtttgggctgagctgggtctttctggtggccctgctgaagggagtccagtgtgagcagcagggagccagcagaccagggccccgggatgcccaggcacaccccggccgtcccagagcagtgcccacacagtgcgacgtcccccccaacagccgcttcgattgcgcccctgacaaggccatcacccaggaacagtgcgaggcccgcggctgctgctacatccctgcaaagcaggggctgcagggagcccagatggggcagccctggtgcttcttcccacccagctaccccagctacaagctggagaacctgagctcctctgaaatgggctacacggccaccctgacccgtaccacccccaccttcttccccaaggacatcctgaccctgcggctggacgtgatgatggagactgagaaccgcctccacttcacgatcaaagatccagctaacaggcgctacgaggtgcccttggagaccccgcgtgtccacagccgggcaccgtccccactctacagcgtggagttctccgaggagcccttcggggtgatcgtgcaccggcagctggacggccgcgtgctgctgaacacgacggtggcgcccctgttctttgcggaccagttccttcagctgtccacctcgctgccctcgcagtatatcacaggcctcgccgagcacctcagtcccctgatgctcagcaccagctggaccaggatcaccctgtggaaccgggaccttgcgcccacgcccggtgcgaacctctacgggtctcaccctttctacctggcgctggaggacggcgggtcggcacacggggtgttcctgctaaacagcaatgccatggatgtggtcctgcagccgagccctgcccttagctggaggtcgacaggtgggatcctggatgtctacatcttcctgggcccagagcccaagagcgtggtgcagcagtacctggacgttgtgggatacccgttcatgccgccatactggggcctgggcttccacctgtgccgctggggctactcctccaccgctatcacccgccaggtggtggagaacatgaccagggcccacttccccctggacgtccaatggaacgacctggactacatggactcccggagggacttcacgttcaacaaggatggcttccgggacttcccggccatggtgcaggagctgcaccagggcggccggcgctacatgatgatcgtggatcctgccatcagcagctcgggccctgccgggagctacaggccctacgacgagggtctgcggaggggggttttcatcaccaacgagaccggccagccgctgattgggaaggtatggcccgggtccactgccttccccgacttcaccaaccccacagccctggcctggtgggaggacatggtggctgagttccatgaccaggtgcccttcgacggcatgtggattgacatgaacgagccttccaacttcatcagaggctctgaggacggctgccccaacaatgagctggagaacccaccctacgtgcctggggtggttggggggaccctccaggcggccaccatctgtgcctccagccaccagtttctctccacacactacaacctgcacaacctctacggcctgaccgaagccatcgcctcccacagggcgctggtgaaggctcgggggacacgcccatttgtgatctcccgctcgacctttgctggccacggccgatacgccggccactggacgggggacgtgtggagctcctgggagcagctcgcctcctccgtgccagaaatcctgcagtttaacctgctgggggtgcctctggtcggggccgacgtctgcggcttcctgggcaacacctcagaggagctgtgtgtgcgctggacccagctgggggccttctaccccttcatgcggaaccacaacagcctgctcagtctgccccaggagccgtacagcttcagcgagccggcccagcaggccatgaggaaggccctcaccctgcgctacgcactcctcccccacctctacacactgttccaccaggcccacgtcgcgggggagaccgtggcccggcccctcttcctggagttccccaaggactctagcacctggactgtggaccaccagctcctgtggggggaggccctgctcatcaccccagtgctccaggccgggaaggccgaagtgactggctacttccccttgggcacatggtacgacctgcagacggtgccaatagaggcccttggcagcctcccacccccacctgcagctccccgtgagccagccatccacagcgaggggcagtgggtgacgctgccggcccccctggacaccatcaacgtccacctccgggctgggtacatcatccccctgcagggccctggcctcacaaccacagagtcccgccagcagcccatggccctggctgtggccctgaccaagggtggagaggcccgaggggagctgttctgggacgatggagagagcctggaagtgctggagcgaggggcctacacacaggtcatcttcctggccaggaataacacgatcgtgaatgagctggtacgtgtgaccagtgagggagctggcctgcagctgcagaaggtgactgtcctgggcgtggccacggcgccccagcaggtcctctccaacggtgtccctgtctccaacttcacctacagccccgacaccaaggtcctggacatctgtgtctcgctgttgatgggagagcagtttctcgtcagctggtgttagccgggcggagtgtgttagtctctccagagggaggctggttccccagggaagcagagcctgtgtgcgggcagcagctgtgtgcgggcctgggggttgttaagtgcaattatttttaataaaaggggcatttggaaaaaaaaaaaaaaggtagcagtcgacagatgaattctgcagatctgtggcttctagctgcccgggtggcatccctgtgacccctccccagtgcctctcctggccctggaagttgccactccagtgcccaccagccttgtcctaataaaattaagttgcatcattttgtctgactaggtgtccttctataatattatggggtggaggggggtggtatggagcaaggggcaagttgggaagacaacctgagttgttgggattccaggcatcgagtttaaacgcggccgcgtagataagtagcatggcgggttaatcattaactacaaggaacccctagtgatggagttggccactccctctctgcgcgctcgctcgctcactgaggccgggcgaccaaaggtcgcccgacgcccgggctttgcccgggcggcctcagtgagcgagcgagcgcgcagttaattaaggcgccctaggccgacccttagactctgtactcagttctataaacgagccattggatacgagatccgtagattgataagggacacggaatatccccggacgcaatagacaccggtggacagcttggtatcctgagcacagtcgcgcgtccgaatctagctctactttagaggccccggattctgatggtcgtagaccgcagaaccgattggggggatgagatctactagttatcagcacacaattgcccattatacgcgcgtataatggactattgtgtgctgatatagggataacagggtaattctagagctagcatatggatccatcgatttgatgcggtattttctccttacgcatctgtgcggtatttcacaccgcatacgtcaaagcaaccatagtacgcgccctgtagcggcgcattaagcgcggcgggtgtggtggttacgcgcagcgtgaccgctacacttgccagcgccctagcgcccgctcctttcgctttcttcccttcctttctcgccacgttcgccggctttccccgtcaagctctaaatcgggggctccctttagggttccgatttagtgctttacggcacctcgaccccaaaaaacttgatttgggtgatggttcacgtagtgggccatcgccctgatagacggtttttcgccctttgacgttggagtccacgttctttaatagtggactcttgttccaaactggaacaacactcaactctatctcgggctattcttttgatttataagggattttgccgatttcggtctattggttaaaaaatgagctgatttaacaaaaatttaacgcgaattttaacaaaatattaacgtttacaattttatggtgcactctcagtacaatctgctctgatgccgcatagttaagccagccccgacacccgccaacacccgctgacgcgccctgacgggcttgtctgctcccggcatccgcttacagacaagctgtgaccgtctccgggagctgcatgtgtcagaggttttcaccgtcatcaccgaaacgcgcgagacgaaagggcctcgtgatacgcctatttttataggttaatgtcatgataataatggtttcttagacgtcaggtggcacttttcggggaaatgtgcgcggaacccctatttgtttatttttctaaatacattcaaatatgtatccgctcatgagacaataaccctgataaatgcttcaataatattgaaaaaggaagagtatgagccatattcaacgggaaacgtcgaggccgcgattaaattccaacatggatgctgatttatatgggtataaatgggctcgcgataatgtcgggcaatcaggtgcgacaatctatcgcttgtatgggaagcccgatgcgccagagttgtttctgaaacatggcaaaggtagcgttgccaatgatgttacagatgagatggtcagactaaactggctgacggaatttatgcctcttccgaccatcaagcattttatccgtactcctgatgatgcatggttactcaccactgcgatccccggaaaaacagcattccaggtattagaagaatatcctgattcaggtgaaaatattgttgatgcgctggcagtgttcctgcgccggttgcattcgattcctgtttgtaattgtccttttaacagcgatcgcgtatttcgtctcgctcaggcgcaatcacgaatgaataacggtttggttgatgcgagtgattttgatgacgagcgtaatggctggcctgttgaacaagtctggaaagaaatgcataaacttttgccattctcaccggattcagtcgtcactcatggtgatttctcacttgataaccttatttttgacgaggggaaattaataggttgtattgatgttggacgagtcggaatcgcagaccgataccaggatcttgccatcctatggaactgcctcggtgagttttctccttcattacagaaacggctttttcaaaaatatggtattgataatcctgatatgaataaattgcagtttcatttgatgctcgatgagtttttctaagcgtataatggtctagagctagcatatggatccatcgattccattatacgcctgtcagaccaagtttactcatatatactttagattgatttaaaacttcatttttaatttaaaaggatctaggtgaagatcctttttgataatctcatgaccaaaatcccttaacgtgagttttcgttccactgagcgtcagaccccgtagaaaagatcaaaggatcttcttgagatcctttttttctgcgcgtaatctgctgcttgcaaacaaaaaaaccaccgctaccagcggtggtttgtttgccggatcaagagctaccaactctttttccgaaggtaactggcttcagcagagcgcagataccaaatactgttcttctagtgtagccgtagttaggccaccacttcaagaactctgtagcaccgcctacatacctcgctctgctaatcctgttaccagtggctgctgccagtggcgataagtcgtgtcttaccgggttggactcaagacgatagttaccggataaggcgcagcggtcgggctgaacggggggttcgtgcacacagcccagcttggagcgaacgacctacaccgaactgagatacctacagcgtgagctatgagaaagcgccacgcttcccgaagggagaaaggcggacaggtatccggtaagcggcagggtcggaacaggagagcgcacgagggagcttccagggggaaacgcctggtatctttatagtcctgtcgggtttcgccacctctgacttgagcgtcgatttttgtgatgctcgtcaggggggcggagcctatggaaaaacgccagcaacgcggcctttttacggttcctggccttttgctggccttttgctcacatgt

SEQ ID NO: 512 - DNA, 7700 bp, synthetic construct
  source 1..7700: mol_type = other DNA
tctagagctagcatatggatccatcgatttagggataacagggtaattatcagcacacaattgcccattatacgcgcgtataatggactattgtgtgctgatatctgtacacttaagggctagatcttagcttacgtcactagagggtccacgtttagtttttaagatccattgatctcctaaacgctgcaagattcgcaacctggtatacttagcctaggcgctaggtcctagtgcagcgggactttttttctaaagtcgttgagaggaggagtcgtcagaccagatagctttgatgtcctgatcggaaggatcgttggcccccctgcaggcagctgttaattaactgcgcgctcgctcgctcactgaggccgcccgggcaaagcccgggcgtcgggcgacctttggtcgcccggcctcagtgagcgagcgagcgcgcagagagggagtggccaactccatcactaggggttccttgtagttaatgattaacccgccatgctacttatctacggcgcgccacgcgtggaggggtggagtcgtgacgtgaattacgtcatagggttagggaggtcggccgctctaggagttaatttttaaaaagcagtcaaaagtccaagtgcccttgcgagcatttactctctctgtttgctctggttaataatctcaggagcacaaacattccttactagttctaggagttaatttttaaaaagcagtcaaaagtccaagtgcccttgcgagcatttactctctctgtttgctctggttaataatctcaggagcacaaacattccttactagttctagagcggccgccagtgtgctggaattcggcttttttagggctggaagctacctttgacatcatttcctctgcgaatgcatgtataatttctacagaacctattagaaaggatcacccagcctctgcttttgtacaactttcccttaaaaaactgccaatcccactgctgtttggcccaatagtgagaactttttcctgctgcctcttggtgcttttgcctatggcccctattctgcctgctgaagacactcttgccagcatggacttaaacccctccagctctgacaatcctctttctcttttgttttacatgaagggtctggcagccaaagcaatcactcaaagttcaaaccttatcattttttgctttgttcctcttggccttggttttgtacatcagctttgaaaataccatcccagggttaatgctggggttaatttataactgagagtgctctagttctgcaatacaggacatgctataaaaatggaaagatgttgctttctgagagatcagcttacatgtggtaccgagctcggatccactagtaacggccgccagtgtgctggaattcggctttccaggccatctccaaccatgggagtgaggcacccgccctgctcccaccggctcctggccgtctgcgccctcgtgtccttggcaaccgctgcactcctggggcagcagggagccagcagaccagggccccgggatgcccaggcacaccccggccgtcccagagcagtgcccacacagtgcgacgtcccccccaacagccgcttcgattgcgcccctgacaaggccatcacccaggaacagtgcgaggcccgcggctgctgctacatccctgcaaagcaggggctgcagggagcccagatggggcagccctggtgcttcttcccacccagctaccccagctacaagctggagaacctgagctcctctgaaatgggctacacggccaccctgacccgtaccacccccaccttcttccccaaggacatcctgaccctgcggctggacgtgatgatggagactgagaaccgcctccacttcacgatcaaagatccagctaacaggcgctacgaggtgcccttggagaccccgcgtgtccacagccgggcaccgtccccactctacagcgtggagttctccgaggagcccttcggggtgatcgtgcaccggcagctggacggccgcgtgctgctgaacacgacggtggcgcccctgttctttgcggaccagttccttcagctgtccacctcgctgccctcgcagtatatcacaggcctcgccgagcacctcagtcccctgatgctcagcaccagctggaccaggatcaccctgtggaaccgggaccttgcgcccacgcccggtgcgaacctctacgggtctcaccctttctacctggcgctggaggacggcgggtcggcacacggggtgttcctgctaaacagcaatgccatggatgtggtcctgcagccgagccctgcccttagctggaggtcgacaggtgggatcctggatgtctacatcttcctgggcccagagcccaagagcgtggtgcagcagtacctggacgttgtgggatacccgttcatgccgccatactggggcctgggcttccacctgtgccgctggggctactcctccaccgctatcacccgccaggtggtggagaacatgaccagggcccacttccccctggacgtccaatggaacgacctggactacatggactcccggagggacttcacgttcaacaaggatggcttccgggacttcccggccatggtgcaggagctgcaccagggcggccggcgctacatgatgatcgtggatcctgccatcagcagctcgggccctgccgggagctacaggccctacgacgagggtctgcggaggggggttttcatcaccaacgagaccggccagccgctgattgggaaggtatggcccgggtccactgccttccccgacttcaccaaccccacagccctggcctggtgggaggacatggtggctgagttccatgaccaggtgcccttcgacggcatgtggattgacatgaacgagccttccaacttcatcagaggctctgaggacggctgccccaacaatgagctggagaacccaccctacgtgcctggggtggttggggggaccctccaggcggccaccatctgtgcctccagccaccagtttctctccacacactacaacctgcacaacctctacggcctgaccgaagccatcgcctcccacagggcgctggtgaaggctcgggggacacgcccatttgtgatctcccgctcgacctttgctggccacggccgatacgccggccactggacgggggacgtgtggagctcctgggagcagctcgcctcctccgtgccagaaatcctgcagtttaacctgctgggggtgcctctggtcggggccgacgtctgcggcttcctgggcaacacctcagaggagctgtgtgtgcgctggacccagctgggggccttctaccccttcatgcggaaccacaacagcctgctcagtctgccccaggagccgtacagcttcagcgagccggcccagcaggccatgaggaaggccctcaccctgcgctacgcactcctcccccacctctacacactgttccaccaggcccacgtcgcgggggagaccgtggcccggcccctcttcctggagttccccaaggactctagcacctggactgtggaccaccagctcctgtggggggaggccctgctcatcaccccagtgctccaggccgggaaggccgaagtgactggctacttccccttgggcacatggtacgacctgcagacggtgccaatagaggcccttggcagcctcccacccccacctgcagctccccgtgagccagccatccacagcgaggggcagtgggtgacgctgccggcccccctggacaccatcaacgtccacctccgggctgggtacatcatccccctgcagggccctggcctcacaaccacagagtcccgccagcagcccatggccctggctgtggccctgaccaagggtggagaggcccgaggggagctgttctgggacgatggagagagcctggaagtgctggagcgaggggcctacacacaggtcatcttcctggccaggaataacacgatcgtgaatgagctggtacgtgtgaccagtgagggagctggcctgcagctgcagaaggtgactgtcctgggcgtggccacggcgccccagcaggtcctctccaacggtgtccctgtctccaacttcacctacagccccgacaccaaggtcctggacatctgtgtctcgctgttgatgggagagcagtttctcgtcagctggtgttagccgggcggagtgtgttagtctctccagagggaggctggttccccagggaagcagagcctgtgtgcgggcagcagctgtgtgcgggcctgggggttgttaagtgcaattatttttaataaaaggggcatttggaaaaaaaaaaaaaaggtagcagtcgacagatgaattctgcagatctgtggcttctagctgcccgggtggcatccctgtgacccctccccagtgcctctcctggccctggaagttgccactccagtgcccaccagccttgtcctaataaaattaagttgcatcattttgtctgactaggtgtccttctataatattatggggtggaggggggtggtatggagcaaggggcaagttgggaagacaacctgagttgttgggattccaggcatcgagtttaaacgcggccgcgtagataagtagcatggcgggttaatcattaactacaaggaacccctagtgatggagttggccactccctctctgcgcgctcgctcgctcactgaggccgggcgaccaaaggtcgcccgacgcccgggctttgcccgggcggcctcagtgagcgagcgagcgcgcagttaattaaggcgccctaggccgacccttagactctgtactcagttctataaacgagccattggatacgagatccgtagattgataagggacacggaatatccccggacgcaatagacaccggtggacagcttggtatcctgagcacagtcgcgcgtccgaatctagctctactttagaggccccggattctgatggtcgtagaccgcagaaccgattggggggatgagatctactagttatcagcacacaattgcccattatacgcgcgtataatggactattgtgtgctgatatagggataacagggtaattctagagctagcatatggatccatcgatttgatgcggtattttctccttacgcatctgtgcggtatttcacaccgcatacgtcaaagcaaccatagtacgcgccctgtagcggcgcattaagcgcggcgggtgtggtggttacgcgcagcgtgaccgctacacttgccagcgccctagcgcccgctcctttcgctttcttcccttcctttctcgccacgttcgccggctttccccgtcaagctctaaatcgggggctccctttagggttccgatttagtgctttacggcacctcgaccccaaaaaacttgatttgggtgatggttcacgtagtgggccatcgccctgatagacggtttttcgccctttgacgttggagtccacgttctttaatagtggactcttgttccaaactggaacaacactcaactctatctcgggctattcttttgatttataagggattttgccgatttcggtctattggttaaaaaatgagctgatttaacaaaaatttaacgcgaattttaacaaaatattaacgtttacaattttatggtgcactctcagtacaatctgctctgatgccgcatagttaagccagccccgacacccgccaacacccgctgacgcgccctgacgggcttgtctgctcccggcatccgcttacagacaagctgtgaccgtctccgggagctgcatgtgtcagaggttttcaccgtcatcaccgaaacgcgcgagacgaaagggcctcgtgatacgcctatttttataggttaatgtcatgataataatggtttcttagacgtcaggtggcacttttcggggaaatgtgcgcggaacccctatttgtttatttttctaaatacattcaaatatgtatccgctcatgagacaataaccctgataaatgcttcaataatattgaaaaaggaagagtatgagccatattcaacgggaaacgtcgaggccgcgattaaattccaacatggatgctgatttatatgggtataaatgggctcgcgataatgtcgggcaatcaggtgcgacaatctatcgcttgtatgggaagcccgatgcgccagagttgtttctgaaacatggcaaaggtagcgttgccaatgatgttacagatgagatggtcagactaaactggctgacggaatttatgcctcttccgaccatcaagcattttatccgtactcctgatgatgcatggttactcaccactgcgatccccggaaaaacagcattccaggtattagaagaatatcctgattcaggtgaaaatattgttgatgcgctggcagtgttcctgcgccggttgcattcgattcctgtttgtaattgtccttttaacagcgatcgcgtatttcgtctcgctcaggcgcaatcacgaatgaataacggtttggttgatgcgagtgattttgatgacgagcgtaatggctggcctgttgaacaagtctggaaagaaatgcataaacttttgccattctcaccggattcagtcgtcactcatggtgatttctcacttgataaccttatttttgacgaggggaaattaataggttgtattgatgttggacgagtcggaatcgcagaccgataccaggatcttgccatcctatggaactgcctcggtgagttttctccttcattacagaaacggctttttcaaaaatatggtattgataatcctgatatgaataaattgcagtttcatttgatgctcgatgagtttttctaagcgtataatggtctagagctagcatatggatccatcgattccattatacgcctgtcagaccaagtttactcatatatactttagattgatttaaaacttcatttttaatttaaaaggatctaggtgaagatcctttttgataatctcatgaccaaaatcccttaacgtgagttttcgttccactgagcgtcagaccccgtagaaaagatcaaaggatcttcttgagatcctttttttctgcgcgtaatctgctgcttgcaaacaaaaaaaccaccgctaccagcggtggtttgtttgccggatcaagagctaccaactctttttccgaaggtaactggcttcagcagagcgcagataccaaatactgttcttctagtgtagccgtagttaggccaccacttcaagaactctgtagcaccgcctacatacctcgctctgctaatcctgttaccagtggctgctgccagtggcgataagtcgtgtcttaccgggttggactcaagacgatagttaccggataaggcgcagcggtcgggctgaacggggggttcgtgcacacagcccagcttggagcgaacgacctacaccgaactgagatacctacagcgtgagctatgagaaagcgccacgcttcccgaagggagaaaggcggacaggtatccggtaagcggcagggtcggaacaggagagcgcacgagggagcttccagggggaaacgcctggtatctttatagtcctgtcgggtttcgccacctctgacttgagcgtcgatttttgtgatgctcgtcaggggggcggagcctatggaaaaacgccagcaacgcggcctttttacggttcctggccttttgctggccttttgctcacatgt

SEQ ID NO: 513 - DNA, 4385 bp, synthetic construct
  source 1..4385: mol_type = other DNA
tgggccactccctctctgcgcgctcgctcgctcactgaggccgcccgggcaaagcccgggcgtcgggcgacctttggtcgcccggcctcagtgagcgagcgagcgcgcagagagggagtggccaactccatcactaggggttcctggaggggtggagtcgtgacgtgaattacgtcatagggttagggaggtcggccgctctaggagttaatttttaaaaagcagtcaaaagtccaagtgcccttgcgagcatttactctctctgtttgctctggttaataatctcaggagcacaaacattccttactagttctaggagttaatttttaaaaagcagtcaaaagtccaagtgcccttgcgagcatttactctctctgtttgctctggttaataatctcaggagcacaaacattccttactagttctagagcggccgccagtgtgctggaattcggcttttttagggctggaagctacctttgacatcatttcctctgcgaatgcatgtataatttctacagaacctattagaaaggatcacccagcctctgcttttgtacaactttcccttaaaaaactgccaatcccactgctgtttggcccaatagtgagaactttttcctgctgcctcttggtgcttttgcctatggcccctattctgcctgctgaagacactcttgccagcatggacttaaacccctccagctctgacaatcctctttctcttttgttttacatgaagggtctggcagccaaagcaatcactcaaagttcaaaccttatcattttttgctttgttcctcttggccttggttttgtacatcagctttgaaaataccatcccagggttaatgctggggttaatttataactgagagtgctctagttctgcaatacaggacatgctataaaaatggaaagatgttgctttctgagagatcagcttacatgtggtaccgagctcggatccactagtaacggccgccagtgtgctggaattcggctttccaggccatctccaaccatgggagtgaggcacccgccctgctcccaccggctcctggccgtctgcgccctcgtgtccttggcaaccgctgcactcctggggcagcagggagccagcagaccagggccccgggatgcccaggcacaccccggccgtcccagagcagtgcccacacagtgcgacgtcccccccaacagccgcttcgattgcgcccctgacaaggccatcacccaggaacagtgcgaggcccgcggctgctgctacatccctgcaaagcaggggctgcagggagcccagatggggcagccctggtgcttcttcccacccagctaccccagctacaagctggagaacctgagctcctctgaaatgggctacacggccaccctgacccgtaccacccccaccttcttccccaaggacatcctgaccctgcggctggacgtgatgatggagactgagaaccgcctccacttcacgatcaaagatccagctaacaggcgctacgaggtgcccttggagaccccgcgtgtccacagccgggcaccgtccccactctacagcgtggagttctccgaggagcccttcggggtgatcgtgcaccggcagctggacggccgcgtgctgctgaacacgacggtggcgcccctgttctttgcggaccagttccttcagctgtccacctcgctgccctcgcagtatatcacaggcctcgccgagcacctcagtcccctgatgctcagcaccagctggaccaggatcaccctgtggaaccgggaccttgcgcccacgcccggtgcgaacctctacgggtctcaccctttctacctggcgctggaggacggcgggtcggcacacggggtgttcctgctaaacagcaatgccatggatgtggtcctgcagccgagccctgcccttagctggaggtcgacaggtgggatcctggatgtctacatcttcctgggcccagagcccaagagcgtggtgcagcagtacctggacgttgtgggatacccgttcatgccgccatactggggcctgggcttccacctgtgccgctggggctactcctccaccgctatcacccgccaggtggtggagaacatgaccagggcccacttccccctggacgtccaatggaacgacctggactacatggactcccggagggacttcacgttcaacaaggatggcttccgggacttcccggccatggtgcaggagctgcaccagggcggccggcgctacatgatgatcgtggatcctgccatcagcagctcgggccctgccgggagctacaggccctacgacgagggtctgcggaggggggttttcatcaccaacgagaccggccagccgctgattgggaaggtatggcccgggtccactgccttccccgacttcaccaaccccacagccctggcctggtgggaggacatggtggctgagttccatgaccaggtgcccttcgacggcatgtggattgacatgaacgagccttccaacttcatcagaggctctgaggacggctgccccaacaatgagctggagaacccaccctacgtgcctggggtggttggggggaccctccaggcggccaccatctgtgcctccagccaccagtttctctccacacactacaacctgcacaacctctacggcctgaccgaagccatcgcctcccacagggcgctggtgaaggctcgggggacacgcccatttgtgatctcccgctcgacctttgctggccacggccgatacgccggccactggacgggggacgtgtggagctcctgggagcagctcgcctcctccgtgccagaaatcctgcagtttaacctgctgggggtgcctctggtcggggccgacgtctgcggcttcctgggcaacacctcagaggagctgtgtgtgcgctggacccagctgggggccttctaccccttcatgcggaaccacaacagcctgctcagtctgccccaggagccgtacagcttcagcgagccggcccagcaggccatgaggaaggccctcaccctgcgctacgcactcctcccccacctctacacactgttccaccaggcccacgtcgcgggggagaccgtggcccggcccctcttcctggagttccccaaggactctagcacctggactgtggaccaccagctcctgtggggggaggccctgctcatcaccccagtgctccaggccgggaaggccgaagtgactggctacttccccttgggcacatggtacgacctgcagacggtgccaatagaggcccttggcagcctcccacccccacctgcagctccccgtgagccagccatccacagcgaggggcagtgggtgacgctgccggcccccctggacaccatcaacgtccacctccgggctgggtacatcatccccctgcagggccctggcctcacaaccacagagtcccgccagcagcccatggccctggctgtggccctgaccaagggtggagaggcccgaggggagctgttctgggacgatggagagagcctggaagtgctggagcgaggggcctacacacaggtcatcttcctggccaggaataacacgatcgtgaatgagctggtacgtgtgaccagtgagggagctggcctgcagctgcagaaggtgactgtcctgggcgtggccacggcgccccagcaggtcctctccaacggtgtccctgtctccaacttcacctacagccccgacaccaaggtcctggacatctgtgtctcgctgttgatgggagagcagtttctcgtcagctggtgttagccgggcggagtgtgttagtctctccagagggaggctggttccccagggaagcagagcctgtgtgcgggcagcagctgtgtgcgggcctgggggttgttaagtgcaattatttttaataaaaggggcatttggaaaaaaaaaaaaaaggtagcagtcgacagatgaattctgcagatctgtggcttctagctgcccgggtggcatccctgtgacccctccccagtgcctctcctggccctggaagttgccactccagtgcccaccagccttgtcctaataaaattaagttgcatcattttgtctgactaggtgtccttctataatattatggggtggaggggggtggtatggagcaaggggcaagttgggaagacaacctgagttgttgggattccaggcatcgagtagataagtagcatggcgggttaatcattaactacaaggaacccctagtgatggagttggccactccctctctgcgcgctcgctcgctcactgaggccgggcgaccaaaggtcgcccgacgcccgggctttgcccgggcggcctcagtgagcgagcgagcgcgcagagagggacagatccg

SEQ ID NO: 514 - DNA, 4439 bp, synthetic construct
  source 1..4439: mol_type = other DNA
tgggccactccctctctgcgcgctcgctcgctcactgaggccgcccgggcaaagcccgggcgtcgggcgacctttggtcgcccggcctcagtgagcgagcgagcgcgcagagagggagtggccaactccatcactaggggttcctggaggggtggagtcgtgacgtgaattacgtcatagggttagggaggtcggccgctctaggagttaatttttaaaaagcagtcaaaagtccaagtgcccttgcgagcatttactctctctgtttgctctggttaataatctcaggagcacaaacattccttactagttctaggagttaatttttaaaaagcagtcaaaagtccaagtgcccttgcgagcatttactctctctgtttgctctggttaataatctcaggagcacaaacattccttactagttctagagcggccgccagtgtgctggaattcggcttttttagggctggaagctacctttgacatcatttcctctgcgaatgcatgtataatttctacagaacctattagaaaggatcacccagcctctgcttttgtacaactttcccttaaaaaactgccaatcccactgctgtttggcccaatagtgagaactttttcctgctgcctcttggtgcttttgcctatggcccctattctgcctgctgaagacactcttgccagcatggacttaaacccctccagctctgacaatcctctttctcttttgttttacatgaagggtctggcagccaaagcaatcactcaaagttcaaaccttatcattttttgctttgttcctcttggccttggttttgtacatcagctttgaaaataccatcccagggttaatgctggggttaatttataactgagagtgctctagttctgcaatacaggacatgctataaaaatggaaagatgttgctttctgagagatcagcttacatgtggtaccgagctcggatccactagtaacggccgccagtgtgctggaattcggctttccaggccatctccaaccatgggagtgaggcacccgccctgctcccaccggctcctggccgtctgcgccctcgtgtccttggcaaccgctgcactcctggagtttgggctgagctgggtctttctggtggccctgctgaagggagtccagtgtgagcagcagggagccagcagaccagggccccgggatgcccaggcacaccccggccgtcccagagcagtgcccacacagtgcgacgtcccccccaacagccgcttcgattgcgcccctgacaaggccatcacccaggaacagtgcgaggcccgcggctgctgctacatccctgcaaagcaggggctgcagggagcccagatggggcagccctggtgcttcttcccacccagctaccccagctacaagctggagaacctgagctcctctgaaatgggctacacggccaccctgacccgtaccacccccaccttcttccccaaggacatcctgaccctgcggctggacgtgatgatggagactgagaaccgcctccacttcacgatcaaagatccagctaacaggcgctacgaggtgcccttggagaccccgcgtgtccacagccgggcaccgtccccactctacagcgtggagttctccgaggagcccttcggggtgatcgtgcaccggcagctggacggccgcgtgctgctgaacacgacggtggcgcccctgttctttgcggaccagttccttcagctgtccacctcgctgccctcgcagtatatcacaggcctcgccgagcacctcagtcccctgatgctcagcaccagctggaccaggatcaccctgtggaaccgggaccttgcgcccacgcccggtgcgaacctctacgggtctcaccctttctacctggcgctggaggacggcgggtcggcacacggggtgttcctgctaaacagcaatgccatggatgtggtcctgcagccgagccctgcccttagctggaggtcgacaggtgggatcctggatgtctacatcttcctgggcccagagcccaagagcgtggtgcagcagtacctggacgttgtgggatacccgttcatgccgccatactggggcctgggcttccacctgtgccgctggggctactcctccaccgctatcacccgccaggtggtggagaacatgaccagggcccacttccccctggacgtccaatggaacgacctggactacatggactcccggagggacttcacgttcaacaaggatggcttccgggacttcccggccatggtgcaggagctgcaccagggcggccggcgctacatgatgatcgtggatcctgccatcagcagctcgggccctgccgggagctacaggccctacgacgagggtctgcggaggggggttttcatcaccaacgagaccggccagccgctgattgggaaggtatggcccgggtccactgccttccccgacttcaccaaccccacagccctggcctggtgggaggacatggtggctgagttccatgaccaggtgcccttcgacggcatgtggattgacatgaacgagccttccaacttcatcagaggctctgaggacggctgccccaacaatgagctggagaacccaccctacgtgcctggggtggttggggggaccctccaggcggccaccatctgtgcctccagccaccagtttctctccacacactacaacctgcacaacctctacggcctgaccgaagccatcgcctcccacagggcgctggtgaaggctcgggggacacgcccatttgtgatctcccgctcgacctttgctggccacggccgatacgccggccactggacgggggacgtgtggagctcctgggagcagctcgcctcctccgtgccagaaatcctgcagtttaacctgctgggggtgcctctggtcggggccgacgtctgcggcttcctgggcaacacctcagaggagctgtgtgtgcgctggacccagctgggggccttctaccccttcatgcggaaccacaacagcctgctcagtctgccccaggagccgtacagcttcagcgagccggcccagcaggccatgaggaaggccctcaccctgcgctacgcactcctcccccacctctacacactgttccaccaggcccacgtcgcgggggagaccgtggcccggcccctcttcctggagttccccaaggactctagcacctggactgtggaccaccagctcctgtggggggaggccctgctcatcaccccagtgctccaggccgggaaggccgaagtgactggctacttccccttgggcacatggtacgacctgcagacggtgccaatagaggcccttggcagcctcccacccccacctgcagctccccgtgagccagccatccacagcgaggggcagtgggtgacgctgccggcccccctggacaccatcaacgtccacctccgggctgggtacatcatccccctgcagggccctggcctcacaaccacagagtcccgccagcagcccatggccctggctgtggccctgaccaagggtggagaggcccgaggggagctgttctgggacgatggagagagcctggaagtgctggagcgaggggcctacacacaggtcatcttcctggccaggaataacacgatcgtgaatgagctggtacgtgtgaccagtgagggagctggcctgcagctgcagaaggtgactgtcctgggcgtggccacggcgccccagcaggtcctctccaacggtgtccctgtctccaacttcacctacagccccgacaccaaggtcctggacatctgtgtctcgctgttgatgggagagcagtttctcgtcagctggtgttagccgggcggagtgtgttagtctctccagagggaggctggttccccagggaagcagagcctgtgtgcgggcagcagctgtgtgcgggcctgggggttgttaagtgcaattatttttaataaaaggggcatttggaaaaaaaaaaaaaaggtagcagtcgacagatgaattctgcagatctgtggcttctagctgcccgggtggcatccctgtgacccctccccagtgcctctcctggccctggaagttgccactccagtgcccaccagccttgtcctaataaaattaagttgcatcattttgtctgactaggtgtccttctataatattatggggtggaggggggtggtatggagcaaggggcaagttgggaagacaacctgagttgttgggattccaggcatcgagtagataagtagcatggcgggttaatcattaactacaaggaacccctagtgatggagttggccactccctctctgcgcgctcgctcgctcactgaggccgggcgaccaaaggtcgcccgacgcccgggctttgcccgggcggcctcagtgagcgagcgagcgcgcagagagggacagatccg

SEQ ID NO: 515 - DNA, 4433 bp, synthetic construct
  source 1..4433: mol_type = other DNA
tgggccactccctctctgcgcgctcgctcgctcactgaggccgcccgggcaaagcccgggcgtcgggcgacctttggtcgcccggcctcagtgagcgagcgagcgcgcagagagggagtggccaactccatcactaggggttcctggaggggtggagtcgtgacgtgaattacgtcatagggttagggaggtcggccgctctaggagttaatttttaaaaagcagtcaaaagtccaagtgcccttgcgagcatttactctctctgtttgctctggttaataatctcaggagcacaaacattccttactagttctaggagttaatttttaaaaagcagtcaaaagtccaagtgcccttgcgagcatttactctctctgtttgctctggttaataatctcaggagcacaaacattccttactagttctagagcggccgccagtgtgctggaattcggcttttttagggctggaagctacctttgacatcatttcctctgcgaatgcatgtataatttctacagaacctattagaaaggatcacccagcctctgcttttgtacaactttcccttaaaaaactgccaatcccactgctgtttggcccaatagtgagaactttttcctgctgcctcttggtgcttttgcctatggcccctattctgcctgctgaagacactcttgccagcatggacttaaacccctccagctctgacaatcctctttctcttttgttttacatgaagggtctggcagccaaagcaatcactcaaagttcaaaccttatcattttttgctttgttcctcttggccttggttttgtacatcagctttgaaaataccatcccagggttaatgctggggttaatttataactgagagtgctctagttctgcaatacaggacatgctataaaaatggaaagatgttgctttctgagagatcagcttacatgtggtaccgagctcggatccactagtaacggccgccagtgtgctggaattcggctttccaggccatctccaaccatgggagtgaggcacccgccctgctcccaccggctcctggccgtctgcgccctcgtgtccttggcaaccgctatggagtttgggctgagctgggtctttctggtggccctgctgaagggagtccagtgtgagcagcagggagccagcagaccagggccccgggatgcccaggcacaccccggccgtcccagagcagtgcccacacagtgcgacgtcccccccaacagccgcttcgattgcgcccctgacaaggccatcacccaggaacagtgcgaggcccgcggctgctgctacatccctgcaaagcaggggctgcagggagcccagatggggcagccctggtgcttcttcccacccagctaccccagctacaagctggagaacctgagctcctctgaaatgggctacacggccaccctgacccgtaccacccccaccttcttccccaaggacatcctgaccctgcggctggacgtgatgatggagactgagaaccgcctccacttcacgatcaaagatccagctaacaggcgctacgaggtgcccttggagaccccgcgtgtccacagccgggcaccgtccccactctacagcgtggagttctccgaggagcccttcggggtgatcgtgcaccggcagctggacggccgcgtgctgctgaacacgacggtggcgcccctgttctttgcggaccagttccttcagctgtccacctcgctgccctcgcagtatatcacaggcctcgccgagcacctcagtcccctgatgctcagcaccagctggaccaggatcaccctgtggaaccgggaccttgcgcccacgcccggtgcgaacctctacgggtctcaccctttctacctggcgctggaggacggcgggtcggcacacggggtgttcctgctaaacagcaatgccatggatgtggtcctgcagccgagccctgcccttagctggaggtcgacaggtgggatcctggatgtctacatcttcctgggcccagagcccaagagcgtggtgcagcagtacctggacgttgtgggatacccgttcatgccgccatactggggcctgggcttccacctgtgccgctggggctactcctccaccgctatcacccgccaggtggtggagaacatgaccagggcccacttccccctggacgtccaatggaacgacctggactacatggactcccggagggacttcacgttcaacaaggatggcttccgggacttcccggccatggtgcaggagctgcaccagggcggccggcgctacatgatgatcgtggatcctgccatcagcagctcgggccctgccgggagctacaggccctacgacgagggtctgcggaggggggttttcatcaccaacgagaccggccagccgctgattgggaaggtatggcccgggtccactgccttccccgacttcaccaaccccacagccctggcctggtgggaggacatggtggctgagttccatgaccaggtgcccttcgacggcatgtggattgacatgaacgagccttccaacttcatcagaggctctgaggacggctgccccaacaatgagctggagaacccaccctacgtgcctggggtggttggggggaccctccaggcggccaccatctgtgcctccagccaccagtttctctccacacactacaacctgcacaacctctacggcctgaccgaagccatcgcctcccacagggcgctggtgaaggctcgggggacacgcccatttgtgatctcccgctcgacctttgctggccacggccgatacgccggccactggacgggggacgtgtggagctcctgggagcagctcgcctcctccgtgccagaaatcctgcagtttaacctgctgggggtgcctctggtcggggccgacgtctgcggcttcctgggcaacacctcagaggagctgtgtgtgcgctggacccagctgggggccttctaccccttcatgcggaaccacaacagcctgctcagtctgccccaggagccgtacagcttcagcgagccggcccagcaggccatgaggaaggccctcaccctgcgctacgcactcctcccccacctctacacactgttccaccaggcccacgtcgcgggggagaccgtggcccggcccctcttcctggagttccccaaggactctagcacctggactgtggaccaccagctcctgtggggggaggccctgctcatcaccccagtgctccaggccgggaaggccgaagtgactggctacttccccttgggcacatggtacgacctgcagacggtgccaatagaggcccttggcagcctcccacccccacctgcagctccccgtgagccagccatccacagcgaggggcagtgggtgacgctgccggcccccctggacaccatcaacgtccacctccgggctgggtacatcatccccctgcagggccctggcctcacaaccacagagtcccgccagcagcccatggccctggctgtggccctgaccaagggtggagaggcccgaggggagctgttctgggacgatggagagagcctggaagtgctggagcgaggggcctacacacaggtcatcttcctggccaggaataacacgatcgtgaatgagctggtacgtgtgaccagtgagggagctggcctgcagctgcagaaggtgactgtcctgggcgtggccacggcgccccagcaggtcctctccaacggtgtccctgtctccaacttcacctacagccccgacaccaaggtcctggacatctgtgtctcgctgttgatgggagagcagtttctcgtcagctggtgttagccgggcggagtgtgttagtctctccagagggaggctggttccccagggaagcagagcctgtgtgcgggcagcagctgtgtgcgggcctgggggttgttaagtgcaattatttttaataaaaggggcatttggaaaaaaaaaaaaaaggtagcagtcgacagatgaattctgcagatctgtggcttctagctgcccgggtggcatccctgtgacccctccccagtgcctctcctggccctggaagttgccactccagtgcccaccagccttgtcctaataaaattaagttgcatcattttgtctgactaggtgtccttctataatattatggggtggaggggggtggtatggagcaaggggcaagttgggaagacaacctgagttgttgggattccaggcatcgagtagataagtagcatggcgggttaatcattaactacaaggaacccctagtgatggagttggccactccctctctgcgcgctcgctcgctcactgaggccgggcgaccaaaggtcgcccgacgcccgggctttgcccgggcggcctcagtgagcgagcgagcgcgcagagagggacagatccg

SEQ ID NO: 516 - protein, 11 aa, synthetic construct
GGGTVGDDDDK

SEQ ID NO: 517 - protein, 6 aa, synthetic construct
GGGGGP

SEQ ID NO: 518 - protein, 5 aa, synthetic construct
GGGGS

SEQ ID NO: 519 - protein, 5 aa, synthetic construct
EAAAK

SEQ ID NO: 520 - protein, 9 aa, synthetic construct
GGCGCGCCG

SEQ ID NO: 521 - DNA, 20 bp, synthetic construct
  source 1..20: mol_type = other DNA
cccagcccacttttccccaa

SEQ ID NO: 522 - protein, 6 aa, synthetic construct
PSPLFP

SEQ ID NO: 523 - DNA, 47 bp, synthetic construct
  source 1..47: mol_type = other DNA
ggtaccgagctcggatccactagtaacggccgccagtgtgctggaat

SEQ ID NO: 524 - DNA, 81 bp, synthetic construct
  source 1..81: mol_type = other DNA
atgggagtgaggcacccgccctgctcccaccggctcctggccgtctgcgccctcgtgtccttggcaaccgctgcactcctg

SEQ ID NO: 525 - DNA, 9780 bp, synthetic construct; identical to SEQ ID NO: 502
  source 1..9780: mol_type = other DNA

SEQ ID NO: 526 - DNA, 199 bp, synthetic construct; identical to SEQ ID NO: 101
  source 1..199: mol_type = other DNA

SEQ ID NO: 527 - DNA, 154 bp, synthetic construct; identical to SEQ ID NO: 102
  source 1..154: mol_type = other DNA

SEQ ID NO: 528 - DNA, 127 bp, synthetic construct; identical to SEQ ID NO: 103
  source 1..127: mol_type = other DNA

SEQ ID NO: 529 - DNA, 2208 bp, Adeno-associated virus 3; identical to SEQ ID NO: 459
  source 1..2208: mol_type = genomic DNA

SEQ ID NO: 530 - DNA, 9817 bp, synthetic construct
  source 1..9817: mol_type = other DNA
ctgcgcgctcgctcgctcactgaggccgcccgggcaaagcccgggcgtcgggcgacctttggtcgcccggcctcagtgagcgagcgagcgcgcagagagggagtggccaactccatcactaggggttcctggaggggtggagtcgtgacgtgaattacgtcatagggttagggaggtcggccgctctaggagttaatttttaaaaagcagtcaaaagtccaagtgcccttgcgagcatttactctctctgtttgctctggttaataatctcaggagcacaaacattccttactagttctaggagttaatttttaaaaagcagtcaaaagtccaagtgcccttgcgagcatttactctctctgtttgctctggttaataatctcaggagcacaaacattccttactagttctagagcggccgccagtgtgctggaattcggcttttttagggctggaagctacctttgacatcatttcctctgcgaatgcatgtataatttctacagaacctattagaaaggatcacccagcctctgcttttgtacaactttcccttaaaaaactgccaatcccactgctgtttggcccaatagtgagaactttttcctgctgcctcttggtgcttttgcctatggcccctattctgcctgctgaagacactcttgccagcatggacttaaacccctccagctctgacaatcctctttctcttttgttttacatgaagggtctggcagccaaagcaatcactcaaagttcaaaccttatcattttttgctttgttcctcttggccttggttttgtacatcagctttgaaaataccatcccagggttaatgctggggttaatttataactgagagtgctctagttctgcaatacaggacatgctataaaaatggaaagatgttgctttctgagagatcagcttacatgtgctagcgtagccaaccatgggagtgaggcacccgccctgctcccaccggctcctggccgtctgcgccctcgtgtccttggcaaccgctgcactcctggggcacatcctactccatgatttcctgctggttccccgagagctgagtggctcctccccagtcctggaggagactcacccagctcaccagcagggagccagcagaccagggccccgggacgcccaggcacaccccggccgtcccagagcagtgcccacacagtgcgacgtcccccccaacagccgcttcgattgcgcccctgacaaggccatcacccaggaacagtgcgaggcccgcggctgctgctacatccctgcaaagcaggggctgcagggagcccagatggggcagccctggtgcttcttcccacccagctaccccagctacaagctggagaacctgagctcctctgaaatgggctacacggccaccctgacccgtaccacccccaccttcttccccaaggacatcctgaccctgcggctggacgtgatgatggagactgagaaccgcctccacttcacgatcaaagatccagctaacaggcgctacgaggtgcccttggagaccccgcgtgtccacagccgggcaccgtccccactctacagcgtggagttctccgaggagcccttcggggtgatcgtgcaccggcagctggacggccgcgtgctgctgaacacgacggtggcgcccctgttctttgcggaccagttccttcagctgtccacctcgctgccctcgcagtatatcacaggcctcgccgagcacctcagtcccctgatgctcagcaccagctggaccaggatcaccctgtggaaccgggaccttgcgcccacgcccggtgcgaacctctacgggtctcaccctttctacctggcgctggaggacggcgggtcggcacacggggtgttcctgctaaacagcaacgccatggacgtggtcctgcagccgagccctgcccttagctggaggtcgacaggtgggatcctggacgtctacatcttcctgggcccagagcccaagagcgtggtgcagcagtacctggacgtggtgggatacccgttcatgccgccatactggggcctgggcttccacctgtgccgctggggctactcctccaccgctatcacccgccaggtggtggagaacatgaccagggcccacttccccctggacgtccagtggaacgatctggactacatggactcccggagggacttcacgttcaacaaggatggcttccgggacttcccggccatggtgcaggagctgcaccagggcggccggcgctacatgatgatcgtggatcctgccatcagcagctcgggccctgccgggagctacaggccctacgacgagggtctgcggaggggggttttcatcaccaacgagaccggccagccgctgattgggaaggtgtggcccgggtccactgccttccccgacttcaccaaccccacagccctggcctggtgggaggacatggtggctgagttccatgaccaggtgcccttcgacggcatgtggattgacatgaacgagccttccaacttcatcagaggctctgaggacggctgccccaacaacgagctggagaacccaccctacgtgcctggggtggttggggggaccctccaggcggccaccatctgtgcctccagccaccagtttctctccacacactacaacctgcacaacctctacggcctgaccgaagccatcgcctcccacagggcgctggtgaaggctcgggggacacgcccatttgtgatctcccgctcgacctttgctggccacggccgatacgccggccactggacgggggacgtgtggagctcctgggagcagctcgcctcctccgtgccagaaatcctgcagtttaacctgctgggggtgcctctggtcggggccgacgtctgcggcttcctgggcaacacctcagaggagctgtgtgtgcgctggacccagctgggggccttctaccccttcatgcggaaccacaacagcctgctcagtctgccccaggagccgtacagcttcagcgagccggcccagcaggccatgaggaaggccctcaccctgcgctacgcactcctcccccacctctacacactgttccaccaggcccacgtcgcgggggagaccgtggcccggcccctcttcctggagttccccaaggactctagcacctggactgtggaccaccagctcctgtggggggaggccctgctcatcaccccagtgctccaggccgggaaggccgaagtgactggctacttccccttgggcacatggtacgacctgcagacggtgccaatagaggcccttggcagcctcccacccccacctgcagctccccgtgagccagccatccacagcgaggggcagtgggtgacgctgccggcccccctggacaccatcaacgtgcacctccgggctgggtacatcatccccctgcagggccctggcctcacaaccacagagtcccgccagcagcccatggccctggctgtggccctgaccaagggtggagaggcccgaggggagctgttctgggacgacggagagagcctggaagtgctggagcgaggggcctacacacaggtcatcttcctggccaggaataacacgatcgtgaatgagctggtacgtgtgaccagtgagggagctggcctgcagctgcagaaggtgactgtcctgggcgtggccacggcgccccagcaggtcctctccaacggtgtccctgtctccaacttcacctacagccccgacaccaaggtcctggacatctgtgtctcgctgttgatgggagagcagtttctcgtcagctggtgttgataactcgagccgggcggagtgtgttagtctctccagagggaggctggttccccagggaagcagagcctgtgtgcgggcagcagctgtgtgcgggcctgggggttgttaagtgcaattatttttaataaaaggggcatttggaaaaaaaaaaaaaaggtagcagtcgacagatgaattctgcagatctgtggcttctagctgcccgggtggcatccctgtgacccctccccagtgcctctcctggccctggaagttgccactccagtgcccaccagccttgtcctaataaaattaagttgcatcattttgtctgactaggtgtccttctataatattatggggtggaggggggtggtatggagcaaggggcaagttgggaagacaacctgagttgttgggattccaggcatcgagtagataagtagcatggcgggttaatcattaactacaaggaacccctagtgatggagttggccactccctctctgcgcgctcgctcgctcactgaggccgggcgaccaaaggtcgcccgacgcccgggctttgcccgggcggcctcagtgagcgagcgagcgcgcagagagggacagatccgaagccgggcaaatcagcgcctggcagcagtggcgtctggcggaaaacctcagtgtgacgctccccgccgcgtcccacgcttgttcccggatctgaccaccagcgaaatccgatttttgcaccgagctgggtaataagcgttggcaatttaaccgccagtcaggctttctttcacagtgtggattggcgataaaaaacaactgctgacgccgctgcgcgatcagttcacccgttcaccgctggataacgacttggcgtaagtgaagcgacccgtaagaccctaacgcctgggtcgaacgctggaaggcggcgggccaaaccaggccgaagcagcgttgttgcagttcacggcagatacacttgctgttgcggtgctgattacgaccgctcactcgtggcagcaacaggggaaaaccttatttatcagccggaaaacctaccggattgttggtagtggtcaataggcgattaccgttgtgttgaagtggcgagcgatacaccgcttccggcgcggattggcctgaactgccaactggcgcaggtagcagagcgggtaaactggctcggattagggccgcaagaaaactatcccgaccgccttactgccgcctgttttgaccgctgggatctgccaagtcagacagtatagcccgtacgtcttcccgagcgaaaacggtctgcgctgcgggacgcgcgaattgaatttggcccacaccagtggcgcggcgacttccagttcaatatcagccgctacagtgaacagcaactgttggaaaccagccttcgccaactgctgcacgcggaagaaggcactggctgaatatcgacggtttccagttggggattggtggcgacgactcctggagcccgtcagtatcggcggacttccaactgagcgccggtcgctaccttaccagttggtctggtgtcaaaaagcgtccgcttgagtctagcgatcgcgcgcagatctgtcatgtgagcaaaaggccagcaaaaggccaggaaccgtaaaaaggccgcgttgctggcgtttttccataggctccgcccccctgacgagcatcacaaaaatcgacgctcaagtcagaggtggcgaaacccgacaggactataaagataccaggcgtttccccctggaagctccctcgtgcgctctcctgttccgaccctgccgcttaccggatacctgtccgcctttctcccttcgggaagcgtggcgctttctcatagctcacgctgtaggtatctcagttcggtgtaggtcgttcgctccaagctgggctgtgtgcacgaaccccccgttcagcccgaccgctgcgccttatccggtaactatcgtcttgagtccaacccggtaagacacgacttatcgccactggcagcagccactggtaacaggattagcagagcgaggtatgtaggcggtgctacagagttcttgaagtggtggcctaactacggctacactagaagaacagtatttggtatctgcgctctgctgaagccagttaccttcggaaaaagagttggtagctcttgatccggcaaacaaaccaccgctggtagcggtggtttttttgtttgcaagcagcagattacgcgcagaaaaaaaggatctcaagaagatcctttgatcttttctacggggtctgacgctcagtggaacgaaaactcacgttaagggattttggtcatgagattatcaaaaaggatcttcacctagatccttttcacgtagaaagccagtccgcagaaacggtgctgaccccggatgaatgtcagctactgggctatctggacaagggaaaacgcaagcgcaaagagaaagcaggtagcttgcagtgggcttacatggcgatagctagactgggcggttttatggacagcaagcgaaccggaattgccagctggggcgccctctggtaaggttgggaagccctgcaaagtaaactggatggctttcttgccgccaaggatctgatggcgcaggggatcaagatctgatcaagagacaggatgaggatcgtttcgcatgattgaacaagatggattgcacgcaggttctccggccgcttgggtggagaggctattcggctatgactgggcacaacagacaatcggctgctctgatgccgccgtgttccggctgtcagcgcaggggcgcccggttctttttgtcaagaccgacctgtccggtgccctgaatgaactgcaagacgaggcagcgcggctatcgtggctggccacgacgggcgttccttgcgcagctgtgctcgacgttgtcactgaagcgggaagggactggctgctattgggcgaagtgccggggcaggatctcctgtcatctcaccttgctcctgccgagaaagtatccatcatggctgatgcaatgcggcggctgcatacgcttgatccggctacctgcccattcgaccaccaagcgaaacatcgcatcgagcgagcacgtactcggatggaagccggtcttgtcgatcaggatgatctggacgaagagcatcaggggctcgcgccagccgaactgttcgccaggctcaaggcgagcatgcccgacggcgaggatctcgtcgtgacccatggcgatgcctgcttgccgaatatcatggtggaaaatggccgcttttctggattcatcgactgtggccggctgggtgtggcggaccgctatcaggacatagcgttggctacccgtgatattgctgaagagcttggcggcgaatgggctgaccgcttcctcgtgctttacggtatcgccgctcccgattcgcagcgcatcgccttctatcgccttcttgacgagttcttctgaatttaaagcccaatacgcaaaccgcctctccccgcgcgttggccgaagcggttcaatattttgttaaaattcgcgttaaatttttgttaaatcagctattttttaaccaataggccgaaatcggcaaaatcccttgtaaatcaaaagaatagaccgagatagggttgagtgttgttccagtttggaacaagagtccactattaaagaacgtggactccaacgtcaaagggcgaaaaaccgtctatcagggcgttggcccactacgtgaaccttcaccctaatcaagttttttggggtcgaggtgccgtaaagcactaaatcggaaccctaaagggagcccccgatttagagcttgacggggaaaccggcgaacgtggcgagaaaggaagggaagaaagcgaaaggagcgggcgctagggcgctggcaagtgtagcggtcacgctgcgcgtaaccaccacacccgccgcgctaagcgccgctacagggcgcgtcccttcgccttcaggctgcgtcgagtactgtactgtgagccagagttgcccggcgctctccggctgcggtagttcaggcagttcaatcaactgtttaccttgtggagcgactccagaggcacttcaccgcttgccagcggcttacgatccagcgccacgatccagtgcaggagatcgttatcgctatacggaacaggtattcgctggtcacttcgataaggtttgcccggataaacggaactggaaaaactgctgctggtgttttgcttccgtcagtgctggatcggcgtgcggtcggcaaagaccagaccgttctaacagaactggcgattgttcggcgtatcgccaaaatcaccgccgtaagccgaccacgggttgccgttttcagcaggatttaatcagcgactgatccacccagtcccagacgaagccgccctgtaaacggggatactgacgaaacgcctgccagtatttagcgaaaccgccaagactgttacccaagcgtgggcgtattcgcaaaggatcagcgggcgcgtctctccaggtagcgaaagccttttttgatcgacctttcggcacagccgggaagggctggtcttcaaccacgcgcgcgtacaacgggcaaataatatcggtggccgtggtgtcggctccgccgccttcaactgcaccgggcgggaaggatcgacagatttgatccagcgatacagcgcgtcgtgattagcgccgtggcctgattcaattccccagcgaccagtagatcacactcgggtgattacgattgcgctgcaccagtcgcgttacggttcgctcttcgccggtagccagcgcggatcacggtcagacgattcgttggcacgatccgtgggtttcaatactggcttcaaaccaccactaacaggccgtagcggtcgcacagcgtgtaccacagcggttggttcggataatcgaacagcgcacggcgttaaagttgttctgcttcaacagcaggatattctgcaccttcgtctgctcttcctaacctgaccaagcagaggatctgctcgtgacggttaatcctcgaatcagcaacggcttgccgttcagcagcagcagaccaagttcaatccgcacctcgcggaaaccgacaacgcaggcttctgcttcaatcagcgtgccgtcggcggtgtgcagttcaaccaccgcacgatagagattcgggatttcggcgctccacagtttcgggttttcgacgttcagacgtagtgtgacgcgatctgcaaaccaccacgctcaacgataatttcaccgccgaaaggcgcggtgccgctggcgacctgcgtttcaccctgccagaaagaaactgttacccgtaggtagtcacgcaactcgccgcacactgaacttcagcctccagtacagcgcggctgaaatcgtcttaaagcgagtggcaactggaaatcgctgatttgtgtagtcggtttagcagcaacgagacttcacggaaaatccgctaatccgccacagatcctgatcttccagataactgccgtcactccaacgcagcaccttcaccgcgaggcggttttctccggcgcgtaaaaatcgctcaggtcaaattcagacggcaaacgactgtcctggccgtaaccgacccagcgcccgttgcaccacagattgaaacgccgagtttacgcctcaaaaataattcgcgtctggccttcctgtagccagctttcacaactataatagtgagcgagtaacaacccgtcggattctccgtgggaacaaacggcggattgaccgtatagggataggttacgttggtgtagtagggcgctccgtaaccgtgctactgccagtttgaggggacgacgacagtatcggcctcaggaagatcgcactccagccagctttccggcaccgcttctggtactggaaaccaggcaaagcgcctatcgcctatcaggctgcacaactgttgggaagggcgatctgtgcgggcctcttcgctattacgccagcttgcgaaagggggtagtgctgcaaggcgattaagttgggtaacgccagggttttcccagtcacgacgtggatctgggccactccctct

SEQ ID NO: 531 - DNA, 180 bp, synthetic construct; identical to SEQ ID NO: 186
  source 1..180: mol_type = other DNA
